United States Patent Application Publication US 2024/0226339 A1 - sequence listing, part 4

SEQ ID NO: 67732 - DNA, 22 bp, synthetic construct
  misc_feature 1..22: note = chemically synthesized
  source 1..22: mol_type = other DNA
aagtgtagtctagaaggtggta

SEQ ID NO: 67733 - DNA, 22 bp, synthetic construct
  misc_feature 1..22: note = chemically synthesized
  source 1..22: mol_type = other DNA
agtgtagtctagaaggtggtac

SEQ ID NO: 67734 - DNA, 22 bp, synthetic construct
  misc_feature 1..22: note = chemically synthesized
  source 1..22: mol_type = other DNA
gaaggtggtacatggaagagct

SEQ ID NO: 67735 - DNA, 22 bp, synthetic construct
  misc_feature 1..22: note = chemically synthesized
  source 1..22: mol_type = other DNA
agggacttgaggattatggact

SEQ ID NO: 67736 - DNA, 22 bp, synthetic construct
  misc_feature 1..22: note = chemically synthesized
  source 1..22: mol_type = other DNA
gaggattatggactgcgaaagg

SEQ ID NO: 67737 - DNA, 22 bp, synthetic construct
  misc_feature 1..22: note = chemically synthesized
  source 1..22: mol_type = other DNA
aggattatggactgcgaaagga

SEQ ID NO: 67738 - DNA, 22 bp, synthetic construct
  misc_feature 1..22: note = chemically synthesized
  source 1..22: mol_type = other DNA
tggactgcgaaaggactgtagg

SEQ ID NO: 67739 - DNA, 22 bp, synthetic construct
  misc_feature 1..22: note = chemically synthesized
  source 1..22: mol_type = other DNA
cgaaaggactgtaggtagtcct

SEQ ID NO: 67740 - DNA, 22 bp, synthetic construct
  misc_feature 1..22: note = chemically synthesized
  source 1..22: mol_type = other DNA
taggtagtcctgtattttggcc

SEQ ID NO: 67741 - DNA, 22 bp, synthetic construct
  misc_feature 1..22: note = chemically synthesized
  source 1..22: mol_type = other DNA
tattttggcctgtcaccaatat

SEQ ID NO: 67742 - DNA, 22 bp, synthetic construct
  misc_feature 1..22: note = chemically synthesized
  source 1..22: mol_type = other DNA
tggcctgtcaccaatatagaga

SEQ ID NO: 67743 - DNA, 22 bp, synthetic construct
  misc_feature 1..22: note = chemically synthesized
  source 1..22: mol_type = other DNA
ggcctgtcaccaatatagagac

SEQ ID NO: 67744 - DNA, 22 bp, synthetic construct
  misc_feature 1..22: note = chemically synthesized
  source 1..22: mol_type = other DNA
gcctgtcaccaatatagagacc

SEQ ID NO: 67745 - DNA, 22 bp, synthetic construct
  misc_feature 1..22: note = chemically synthesized
  source 1..22: mol_type = other DNA
tcaccaatatagagacccctcc

SEQ ID NO: 67746 - DNA, 22 bp, synthetic construct
  misc_feature 1..22: note = chemically synthesized
  source 1..22: mol_type = other DNA
ctcatcatagtgtcatccattc

SEQ ID NO: 67747 - DNA, 22 bp, synthetic construct
  misc_feature 1..22: note = chemically synthesized
  source 1..22: mol_type = other DNA
atcatagtgtcatccattctct

SEQ ID NO: 67748 - DNA, 22 bp, synthetic construct
  misc_feature 1..22: note = chemically synthesized
  source 1..22: mol_type = other DNA
tctttttgaagacccagggtga

SEQ ID NO: 67749 - DNA, 22 bp, synthetic construct
  misc_feature 1..22: note = chemically synthesized
  source 1..22: mol_type = other DNA
tttttgaagacccagggtgaaa

SEQ ID NO: 67750 - DNA, 22 bp, synthetic construct
  misc_feature 1..22: note = chemically synthesized
  source 1..22: mol_type = other DNA
tttgaagacccagggtgaaaga

SEQ ID NO: 67751 - DNA, 22 bp, synthetic construct
  misc_feature 1..22: note = chemically synthesized
  source 1..22: mol_type = other DNA
ttgaagacccagggtgaaagaa

SEQ ID NO: 67752 - DNA, 22 bp, synthetic construct
  misc_feature 1..22: note = chemically synthesized
  source 1..22: mol_type = other DNA
tgaagacccagggtgaaagaaa

SEQ ID NO: 67753 - DNA, 22 bp, synthetic construct
  misc_feature 1..22: note = chemically synthesized
  source 1..22: mol_type = other DNA
gaagacccagggtgaaagaaag

SEQ ID NO: 67754 - DNA, 22 bp, synthetic construct
  misc_feature 1..22: note = chemically synthesized
  source 1..22: mol_type = other DNA
aagacccagggtgaaagaaagg

SEQ ID NO: 67755 - DNA, 22 bp, synthetic construct
  misc_feature 1..22: note = chemically synthesized
  source 1..22: mol_type = other DNA
cacgtgggacagctctactgct

SEQ ID NO: 67756 - DNA, 22 bp, synthetic construct
  misc_feature 1..22: note = chemically synthesized
  source 1..22: mol_type = other DNA
tactgcttttgtgcctgtctca

SEQ ID NO: 67757 - DNA, 22 bp, synthetic construct
  misc_feature 1..22: note = chemically synthesized
  source 1..22: mol_type = other DNA
ctgcttttgtgcctgtctcact

SEQ ID NO: 67758 - DNA, 22 bp, synthetic construct
  misc_feature 1..22: note = chemically synthesized
  source 1..22: mol_type = other DNA
cttttgtgcctgtctcactgaa

SEQ ID NO: 67759 - DNA, 22 bp, synthetic construct
  misc_feature 1..22: note = chemically synthesized
  source 1..22: mol_type = other DNA
ttgtgcctgtctcactgaaaaa

SEQ ID NO: 67760 - DNA, 22 bp, synthetic construct
  misc_feature 1..22: note = chemically synthesized
  source 1..22: mol_type = other DNA
tgtgcctgtctcactgaaaaaa

SEQ ID NO: 67761 - DNA, 22 bp, synthetic construct
  misc_feature 1..22: note = chemically synthesized
  source 1..22: mol_type = other DNA
gtgcctgtctcactgaaaaaaa

SEQ ID NO: 67762 - DNA, 22 bp, synthetic construct
  misc_feature 1..22: note = chemically synthesized
  source 1..22: mol_type = other DNA
tgcctgtctcactgaaaaaaaa

SEQ ID NO: 67763 - DNA, 22 bp, synthetic construct
  misc_feature 1..22: note = chemically synthesized
  source 1..22: mol_type = other DNA
tctcactgaaaaaaaaaaaaaa

SEQ ID NO: 67764 - DNA, 22 bp, synthetic construct
  misc_feature 1..22: note = chemically synthesized
  source 1..22: mol_type = other DNA
actgaaaaaaaaaaaaaaacag

SEQ ID NO: 67765 - DNA, 22 bp, synthetic construct
  misc_feature 1..22: note = chemically synthesized
  source 1..22: mol_type = other DNA
aaaaaaaaaaaaaaacagggaa

SEQ ID NO: 67766 - DNA, 22 bp, synthetic construct
  misc_feature 1..22: note = chemically synthesized
  source 1..22: mol_type = other DNA
tctaaaaacatatgtttaggaa

SEQ ID NO: 67767 - DNA, 22 bp, synthetic construct
  misc_feature 1..22: note = chemically synthesized
  source 1..22: mol_type = other DNA
aaaacatatgtttaggaaatat

SEQ ID NO: 67768 - DNA, 22 bp, synthetic construct
  misc_feature 1..22: note = chemically synthesized
  source 1..22: mol_type = other DNA
aggaaatatacacacattcaca

SEQ ID NO: 67769 - DNA, 22 bp, synthetic construct
  misc_feature 1..22: note = chemically synthesized
  source 1..22: mol_type = other DNA
ggaaatatacacacattcacac

SEQ ID NO: 67770 - DNA, 22 bp, synthetic construct
  misc_feature 1..22: note = chemically synthesized
  source 1..22: mol_type = other DNA
acacacgtacacagacacatat

SEQ ID NO: 67771 - DNA, 22 bp, synthetic construct
  misc_feature 1..22: note = chemically synthesized
  source 1..22: mol_type = other DNA
acatatacacacacatgaacac

SEQ ID NO: 67772 - DNA, 22 bp, synthetic construct
  misc_feature 1..22: note = chemically synthesized
  source 1..22: mol_type = other DNA
acacacatgtgcatgcacatgc

SEQ ID NO: 67773 - DNA, 22 bp, synthetic construct
  misc_feature 1..22: note = chemically synthesized
  source 1..22: mol_type = other DNA
acacatgcacaagcatacacac

SEQ ID NO: 67774 - DNA, 22 bp, synthetic construct
  misc_feature 1..22: note = chemically synthesized
  source 1..22: mol_type = other DNA
acaaacacatatgcatgcacac

SEQ ID NO: 67775 - DNA, 22 bp, synthetic construct
  misc_feature 1..22: note = chemically synthesized
  source 1..22: mol_type = other DNA
acacacatatgtacacataaat

SEQ ID NO: 67776 - DNA, 22 bp, synthetic construct
  misc_feature 1..22: note = chemically synthesized
  source 1..22: mol_type = other DNA
gcaaacacacacacacgtacat

SEQ ID NO: 67777 - DNA, 22 bp, synthetic construct
  misc_feature 1..22: note = chemically synthesized
  source 1..22: mol_type = other DNA
caaacacacacacacgtacatt

SEQ ID NO: 67778 - DNA, 22 bp, synthetic construct
  misc_feature 1..22: note = chemically synthesized
  source 1..22: mol_type = other DNA
tagtgaatagcacacatctatg

SEQ ID NO: 67779 - DNA, 22 bp, synthetic construct
  misc_feature 1..22: note = chemically synthesized
  source 1..22: mol_type = other DNA
agtgaatagcacacatctatgt

SEQ ID NO: 67780 - DNA, 22 bp, synthetic construct
  misc_feature 1..22: note = chemically synthesized
  source 1..22: mol_type = other DNA
gtgaatagcacacatctatgta

SEQ ID NO: 67781 - DNA, 22 bp, synthetic construct
  misc_feature 1..22: note = chemically synthesized
  source 1..22: mol_type = other DNA
tgtactcctgtggagagtcctg

SEQ ID NO: 67782 - DNA, 22 bp, synthetic construct
  misc_feature 1..22: note = chemically synthesized
  source 1..22: mol_type = other DNA
ctgtggagagtcctgtggtttt

SEQ ID NO: 67783 - DNA, 22 bp, synthetic construct
  misc_feature 1..22: note = chemically synthesized
  source 1..22: mol_type = other DNA
tggagagtcctgtggttttaat

SEQ ID NO: 67784 - DNA, 22 bp, synthetic construct
  misc_feature 1..22: note = chemically synthesized
  source 1..22: mol_type = other DNA
tggttttaatacctgttaaagt

SEQ ID NO: 67785 - DNA, 22 bp, synthetic construct
  misc_feature 1..22: note = chemically synthesized
  source 1..22: mol_type = other DNA
taatacctgttaaagttgggct

SEQ ID NO: 67786 - DNA, 22 bp, synthetic construct
  misc_feature 1..22: note = chemically synthesized
  source 1..22: mol_type = other DNA
aatacctgttaaagttgggctc

SEQ ID NO: 67787 - DNA, 22 bp, synthetic construct
  misc_feature 1..22: note = chemically synthesized
  source 1..22: mol_type = other DNA
atacctgttaaagttgggctcc

SEQ ID NO: 67788 - DNA, 22 bp, synthetic construct
  misc_feature 1..22: note = chemically synthesized
  source 1..22: mol_type = other DNA
ttaaagttgggctcccaaagca

SEQ ID NO: 67789 - DNA, 22 bp, synthetic construct
  misc_feature 1..22: note = chemically synthesized
  source 1..22: mol_type = other DNA
aagttgggctcccaaagcagtc

SEQ ID NO: 67790 - DNA, 22 bp, synthetic construct
  misc_feature 1..22: note = chemically synthesized
  source 1..22: mol_type = other DNA
ggctcccaaagcagtcattaaa

SEQ ID NO: 67791 - DNA, 22 bp, synthetic construct
  misc_feature 1..22: note = chemically synthesized
  source 1..22: mol_type = other DNA
ccaaagcagtcattaaacgtgt

SEQ ID NO: 67792 - DNA, 22 bp, synthetic construct
  misc_feature 1..22: note = chemically synthesized
  source 1..22: mol_type = other DNA
aacgtgttggaatgatgctttt

SEQ ID NO: 67793 - DNA, 22 bp, synthetic construct
  misc_feature 1..22: note = chemically synthesized
  source 1..22: mol_type = other DNA
gaatgatgctttttgcttagct

SEQ ID NO: 67794 - DNA, 22 bp, synthetic construct
  misc_feature 1..22: note = chemically synthesized
  source 1..22: mol_type = other DNA
tttgcttagctgttttggcaca

SEQ ID NO: 67795 - DNA, 22 bp, synthetic construct
  misc_feature 1..22: note = chemically synthesized
  source 1..22: mol_type = other DNA
ttgcttagctgttttggcacat

SEQ ID NO: 67796 - DNA, 22 bp, synthetic construct
  misc_feature 1..22: note = chemically synthesized
  source 1..22: mol_type = other DNA
tgcttagctgttttggcacatt

SEQ ID NO: 67797 - DNA, 22 bp, synthetic construct
  misc_feature 1..22: note = chemically synthesized
  source 1..22: mol_type = other DNA
gcttagctgttttggcacattt

SEQ ID NO: 67798 - DNA, 22 bp, synthetic construct
  misc_feature 1..22: note = chemically synthesized
  source 1..22: mol_type = other DNA
cttagctgttttggcacatttg

SEQ ID NO: 67799 - DNA, 22 bp, synthetic construct
  misc_feature 1..22: note = chemically synthesized
  source 1..22: mol_type = other DNA
agctgttttggcacatttggaa

SEQ ID NO: 67800 - DNA, 22 bp, synthetic construct
  misc_feature 1..22: note = chemically synthesized
  source 1..22: mol_type = other DNA
gctgttttggcacatttggaaa

SEQ ID NO: 67801 - DNA, 22 bp, synthetic construct
  misc_feature 1..22: note = chemically synthesized
  source 1..22: mol_type = other DNA
ttttggcacatttggaaatctg

SEQ ID NO: 67802 - DNA, 22 bp, synthetic construct
  misc_feature 1..22: note = chemically synthesized
  source 1..22: mol_type = other DNA
tggcacatttggaaatctgcag

SEQ ID NO: 67803 - DNA, 22 bp, synthetic construct
  misc_feature 1..22: note = chemically synthesized
  source 1..22: mol_type = other DNA
ggcacatttggaaatctgcagt

SEQ ID NO: 67804 - DNA, 22 bp, synthetic construct
  misc_feature 1..22: note = chemically synthesized
  source 1..22: mol_type = other DNA
gcacatttggaaatctgcagta

SEQ ID NO: 67805 - DNA, 22 bp, synthetic construct
  misc_feature 1..22: note = chemically synthesized
  source 1..22: mol_type = other DNA
ggaaatctgcagtattacctgt

SEQ ID NO: 67806 - DNA, 22 bp, synthetic construct
  misc_feature 1..22: note = chemically synthesized
  source 1..22: mol_type = other DNA
gaaatctgcagtattacctgtt

SEQ ID NO: 67807 - DNA, 22 bp, synthetic construct
  misc_feature 1..22: note = chemically synthesized
  source 1..22: mol_type = other DNA
cagtattacctgttgattagta

SEQ ID NO: 67808 - DNA, 22 bp, synthetic construct
  misc_feature 1..22: note = chemically synthesized
  source 1..22: mol_type = other DNA
cctgttgattagtagacagtaa

SEQ ID NO: 67809 - DNA, 22 bp, synthetic construct
  misc_feature 1..22: note = chemically synthesized
  source 1..22: mol_type = other DNA
ttgattagtagacagtaatgtg

SEQ ID NO: 67810 - DNA, 22 bp, synthetic construct
  misc_feature 1..22: note = chemically synthesized
  source 1..22: mol_type = other DNA
attagtagacagtaatgtggct

SEQ ID NO: 67811 - DNA, 22 bp, synthetic construct
  misc_feature 1..22: note = chemically synthesized
  source 1..22: mol_type = other DNA
gtagacagtaatgtggctgtat

SEQ ID NO: 67812 - DNA, 22 bp, synthetic construct
  misc_feature 1..22: note = chemically synthesized
  source 1..22: mol_type = other DNA
tattacacacccagtgattagt

SEQ ID NO: 67813 - DNA, 22 bp, synthetic construct
  misc_feature 1..22: note = chemically synthesized
  source 1..22: mol_type = other DNA
cacacccagtgattagtttcag

SEQ ID NO: 67814 - DNA, 22 bp, synthetic construct
  misc_feature 1..22: note = chemically synthesized
  source 1..22: mol_type = other DNA
gtttcagaaacaaatagcatgt

SEQ ID NO: 67815 - DNA, 22 bp, synthetic construct
  misc_feature 1..22: note = chemically synthesized
  source 1..22: mol_type = other DNA
cagaaacaaatagcatgttaat

SEQ ID NO: 67816 - DNA, 22 bp, synthetic construct
  misc_feature 1..22: note = chemically synthesized
  source 1..22: mol_type = other DNA
agaaacaaatagcatgttaata

SEQ ID NO: 67817 - DNA, 22 bp, synthetic construct
  misc_feature 1..22: note = chemically synthesized
  source 1..22: mol_type = other DNA
atagtcaaggaatctttgagat

SEQ ID NO: 67818 - DNA, 22 bp, synthetic construct
  misc_feature 1..22: note = chemically synthesized
  source 1..22: mol_type = other DNA
tgagatgttcttgaggaaacca

SEQ ID NO: 67819 - DNA, 22 bp, synthetic construct
  misc_feature 1..22: note = chemically synthesized
  source 1..22: mol_type = other DNA
gagatgttcttgaggaaaccaa

SEQ ID NO: 67820 - DNA, 22 bp, synthetic construct
  misc_feature 1..22: note = chemically synthesized
  source 1..22: mol_type = other DNA
agatgttcttgaggaaaccaaa

SEQ ID NO: 67821 - DNA, 22 bp, synthetic construct
  misc_feature 1..22: note = chemically synthesized
  source 1..22: mol_type = other DNA
ttgaggaaaccaaaaaacttga

SEQ ID NO: 67822 - DNA, 22 bp, synthetic construct
  misc_feature 1..22: note = chemically synthesized
  source 1..22: mol_type = other DNA
gaggaaaccaaaaaacttgatt

SEQ ID NO: 67823 - DNA, 22 bp, synthetic construct
  misc_feature 1..22: note = chemically synthesized
  source 1..22: mol_type = other DNA
aggaaaccaaaaaacttgattt

SEQ ID NO: 67824 - DNA, 22 bp, synthetic construct
  misc_feature 1..22: note = chemically synthesized
  source 1..22: mol_type = other DNA
gatttaatgacttaaattccag

SEQ ID NO: 67825 - DNA, 22 bp, synthetic construct
  misc_feature 1..22: note = chemically synthesized
  source 1..22: mol_type = other DNA
atttaatgacttaaattccagg

SEQ ID NO: 67826 - DNA, 22 bp, synthetic construct
  misc_feature 1..22: note = chemically synthesized
  source 1..22: mol_type = other DNA
aatgacttaaattccaggaaca

SEQ ID NO: 67827 - DNA, 22 bp, synthetic construct
  misc_feature 1..22: note = chemically synthesized
  source 1..22: mol_type = other DNA
atgacttaaattccaggaacat

SEQ ID NO: 67828 - DNA, 22 bp, synthetic construct
  misc_feature 1..22: note = chemically synthesized
  source 1..22: mol_type = other DNA
aaattccaggaacatcccactg

SEQ ID NO: 67829 - DNA, 22 bp, synthetic construct
  misc_feature 1..22: note = chemically synthesized
  source 1..22: mol_type = other DNA
aattccaggaacatcccactgg

SEQ ID NO: 67830 - DNA, 22 bp, synthetic construct
  misc_feature 1..22: note = chemically synthesized
  source 1..22: mol_type = other DNA
caggaacatcccactgggctta

SEQ ID NO: 67831 - DNA, 22 bp, synthetic construct
  misc_feature 1..22: note = chemically synthesized
  source 1..22: mol_type = other DNA
ggcttagagctctttgtcaaaa

SEQ ID NO: 67832 - DNA, 22 bp, synthetic construct
  misc_feature 1..22: note = chemically synthesized
  source 1..22: mol_type = other DNA
agagctctttgtcaaaagttgg

SEQ ID NO: 67833 - DNA, 22 bp, synthetic construct
  misc_feature 1..22: note = chemically synthesized
  source 1..22: mol_type = other DNA
gagctctttgtcaaaagttggt

SEQ ID NO: 67834 - DNA, 22 bp, synthetic construct
  misc_feature 1..22: note = chemically synthesized
  source 1..22: mol_type = other DNA
tttgtcaaaagttggtacccaa

SEQ ID NO: 67835 - DNA, 22 bp, synthetic construct
  misc_feature 1..22: note = chemically synthesized
  source 1..22: mol_type = other DNA
tgtcaaaagttggtacccaata

SEQ ID NO: 67836 - DNA, 22 bp, synthetic construct
  misc_feature 1..22: note = chemically synthesized
  source 1..22: mol_type = other DNA
gtcaaaagttggtacccaatat

SEQ ID NO: 67837 - DNA, 22 bp, synthetic construct
  misc_feature 1..22: note = chemically synthesized
  source 1..22: mol_type = other DNA
tcaaaagttggtacccaatata

SEQ ID NO: 67838 - DNA, 22 bp, synthetic construct
  misc_feature 1..22: note = chemically synthesized
  source 1..22: mol_type = other DNA
gtacccaatatatgtagaaatg

SEQ ID NO: 67839 - DNA, 22 bp, synthetic construct
  misc_feature 1..22: note = chemically synthesized
  source 1..22: mol_type = other DNA
aatcaaagccattcccagtttg

SEQ ID NO: 67840 - DNA, 22 bp, synthetic construct
  misc_feature 1..22: note = chemically synthesized
  source 1..22: mol_type = other DNA
ccagtttgctgcatatttttta

SEQ ID NO: 67841 - DNA, 22 bp, synthetic construct
  misc_feature 1..22: note = chemically synthesized
  source 1..22: mol_type = other DNA
gctgcatattttttaatgaaac

SEQ ID NO: 67842 - DNA, 22 bp, synthetic construct
  misc_feature 1..22: note = chemically synthesized
  source 1..22: mol_type = other DNA
ctgcatattttttaatgaaacc

SEQ ID NO: 67843 - DNA, 22 bp, synthetic construct
  misc_feature 1..22: note = chemically synthesized
  source 1..22: mol_type = other DNA
catattttttaatgaaacctga

SEQ ID NO: 67844 - DNA, 22 bp, synthetic construct
  misc_feature 1..22: note = chemically synthesized
  source 1..22: mol_type = other DNA
tttaatgaaacctgaaaaataa

SEQ ID NO: 67845 - DNA, 22 bp, synthetic construct
  misc_feature 1..22: note = chemically synthesized
  source 1..22: mol_type = other DNA
ttaatgaaacctgaaaaataag

SEQ ID NO: 67846 - DNA, 22 bp, synthetic construct
  misc_feature 1..22: note = chemically synthesized
  source 1..22: mol_type = other DNA
taatgaaacctgaaaaataaga

SEQ ID NO: 67847 - DNA, 22 bp, synthetic construct
  misc_feature 1..22: note = chemically synthesized
  source 1..22: mol_type = other DNA
aatgaaacctgaaaaataagag

SEQ ID NO: 67848 - DNA, 22 bp, synthetic construct
  misc_feature 1..22: note = chemically synthesized
  source 1..22: mol_type = other DNA
atgaaacctgaaaaataagagt

SEQ ID NO: 67849 - DNA, 22 bp, synthetic construct
  misc_feature 1..22: note = chemically synthesized
  source 1..22: mol_type = other DNA
aaaaataagagtcactattttt

SEQ ID NO: 67850 - DNA, 22 bp, synthetic construct
  misc_feature 1..22: note = chemically synthesized
  source 1..22: mol_type = other DNA
tttttaaattcagccataagga

SEQ ID NO: 67851 - DNA, 22 bp, synthetic construct
  misc_feature 1..22: note = chemically synthesized
  source 1..22: mol_type = other DNA
ttaaattcagccataaggaaac

SEQ ID NO: 67852 - DNA, 22 bp, synthetic construct
  misc_feature 1..22: note = chemically synthesized
  source 1..22: mol_type = other DNA
taaattcagccataaggaaact

SEQ ID NO: 67853 - DNA, 22 bp, synthetic construct
  misc_feature 1..22: note = chemically synthesized
  source 1..22: mol_type = other DNA
aaattcagccataaggaaactt

SEQ ID NO: 67854 - DNA, 22 bp, synthetic construct
  misc_feature 1..22: note = chemically synthesized
  source 1..22: mol_type = other DNA
aattcagccataaggaaacttt

SEQ ID NO: 67855 - DNA, 22 bp, synthetic construct
  misc_feature 1..22: note = chemically synthesized
  source 1..22: mol_type = other DNA
agccataaggaaactttgcaac

SEQ ID NO: 67856 - DNA, 22 bp, synthetic construct
  misc_feature 1..22: note = chemically synthesized
  source 1..22: mol_type = other DNA
tgcaacctaataatgtgtaagg

SEQ ID NO: 67857 - DNA, 22 bp, synthetic construct
  misc_feature 1..22: note = chemically synthesized
  source 1..22: mol_type = other DNA
gcaacctaataatgtgtaaggc

SEQ ID NO: 67858 - DNA, 22 bp, synthetic construct
  misc_feature 1..22: note = chemically synthesized
  source 1..22: mol_type = other DNA
caacctaataatgtgtaaggca

SEQ ID NO: 67859 - DNA, 22 bp, synthetic construct
  misc_feature 1..22: note = chemically synthesized
  source 1..22: mol_type = other DNA
ataatgtgtaaggcatttctga

SEQ ID NO: 67860 - DNA, 22 bp, synthetic construct
  misc_feature 1..22: note = chemically synthesized
  source 1..22: mol_type = other DNA
ctgaggccccaagtggaaatac

SEQ ID NO: 67861 - DNA, 22 bp, synthetic construct
  misc_feature 1..22: note = chemically synthesized
  source 1..22: mol_type = other DNA
tgaggccccaagtggaaatact

SEQ ID NO: 67862 - DNA, 22 bp, synthetic construct
  misc_feature 1..22: note = chemically synthesized
  source 1..22: mol_type = other DNA
aggccccaagtggaaatactgg

SEQ ID NO: 67863 - DNA, 22 bp, synthetic construct
  misc_feature 1..22: note = chemically synthesized
  source 1..22: mol_type = other DNA
ggtctagagagacctttatgaa

SEQ ID NO: 67864 - DNA, 22 bp, synthetic construct
  misc_feature 1..22: note = chemically synthesized
  source 1..22: mol_type = other DNA
gagagacctttatgaaatagaa

SEQ ID NO: 67865 - DNA, 22 bp, synthetic construct
  misc_feature 1..22: note = chemically synthesized
  source 1..22: mol_type = other DNA
tatgaaatagaacaggttgaaa

SEQ ID NO: 67866 - DNA, 22 bp, synthetic construct
  misc_feature 1..22: note = chemically synthesized
  source 1..22: mol_type = other DNA
atgaaatagaacaggttgaaac

SEQ ID NO: 67867 - DNA, 22 bp, synthetic construct
  misc_feature 1..22: note = chemically synthesized
  source 1..22: mol_type = other DNA
tgaaatagaacaggttgaaaca

SEQ ID NO: 67868 - DNA, 22 bp, synthetic construct
  misc_feature 1..22: note = chemically synthesized
  source 1..22: mol_type = other DNA
aaacaccttccaccagaaaagt

SEQ ID NO: 67869 - DNA, 22 bp, synthetic construct
  misc_feature 1..22: note = chemically synthesized
  source 1..22: mol_type = other DNA
ccaccagaaaagtgtaagacat

SEQ ID NO: 67870 - DNA, 22 bp, synthetic construct
  misc_feature 1..22: note = chemically synthesized
  source 1..22: mol_type = other DNA
caccagaaaagtgtaagacatt

SEQ ID NO: 67871 - DNA, 22 bp, synthetic construct
  misc_feature 1..22: note = chemically synthesized
  source 1..22: mol_type = other DNA
gaaaaaagattgagtcagaaaa

SEQ ID NO: 67872 - DNA, 22 bp, synthetic construct
  misc_feature 1..22: note = chemically synthesized
  source 1..22: mol_type = other DNA
aaaaaagattgagtcagaaaag

SEQ ID NO: 67873 - DNA, 22 bp, synthetic construct
  misc_feature 1..22: note = chemically synthesized
  source 1..22: mol_type = other DNA
agtcagaaaagggaaatgtgtc

SEQ ID NO: 67874 - DNA, 22 bp, synthetic construct
  misc_feature 1..22: note = chemically synthesized
  source 1..22: mol_type = other DNA
gagagaccagaaagggaaacaa

SEQ ID NO: 67875 - DNA, 22 bp, synthetic construct
  misc_feature 1..22: note = chemically synthesized
  source 1..22: mol_type = other DNA
agagaccagaaagggaaacaag

SEQ ID NO: 67876 - DNA, 22 bp, synthetic construct
  misc_feature 1..22: note = chemically synthesized
  source 1..22: mol_type = other DNA
ctgctgtgtccgtgcagttgcc

SEQ ID NO: 67877 - DNA, 22 bp, synthetic construct
  misc_feature 1..22: note = chemically synthesized
  source 1..22: mol_type = other DNA
ctgtgtccgtgcagttgccaca

SEQ ID NO: 67878 - DNA, 22 bp, synthetic construct
  misc_feature 1..22: note = chemically synthesized
  source 1..22: mol_type = other DNA
tgtccgtgcagttgccacagct

SEQ ID NO: 67879 - DNA, 22 bp, synthetic construct
  misc_feature 1..22: note = chemically synthesized
  source 1..22: mol_type = other DNA
ccacagctgcgttcgctgacat

SEQ ID NO: 67880 - DNA, 22 bp, synthetic construct
  misc_feature 1..22: note = chemically synthesized
  source 1..22: mol_type = other DNA
cgttcgctgacatgtcggcttt

SEQ ID NO: 67881 - DNA, 22 bp, synthetic construct
  misc_feature 1..22: note = chemically synthesized
  source 1..22: mol_type = other DNA
gctgacatgtcggctttaatgg

SEQ ID NO: 67882 - DNA, 22 bp, synthetic construct
  misc_feature 1..22: note = chemically synthesized
  source 1..22: mol_type = other DNA
acatgtcggctttaatggaagc

SEQ ID NO: 67883 - DNA, 22 bp, synthetic construct
  misc_feature 1..22: note = chemically synthesized
  source 1..22: mol_type = other DNA
taatggaagcagtgaggacaca

SEQ ID NO: 67884 - DNA, 22 bp, synthetic construct
  misc_feature 1..22: note = chemically synthesized
  source 1..22: mol_type = other DNA
aatggaagcagtgaggacacaa

SEQ ID NO: 67885 - DNA, 22 bp, synthetic construct
  misc_feature 1..22: note = chemically synthesized
  source 1..22: mol_type = other DNA
atggaagcagtgaggacacaat

SEQ ID NO: 67886 - DNA, 22 bp, synthetic construct
  misc_feature 1..22: note = chemically synthesized
  source 1..22: mol_type = other DNA
tctggcacaagctggtttgggt

SEQ ID NO: 67887 - DNA, 22 bp, synthetic construct
  misc_feature 1..22: note = chemically synthesized
  source 1..22: mol_type = other DNA
gcacaagctggtttgggtgttg

SEQ ID NO: 67888 - DNA, 22 bp, synthetic construct
  misc_feature 1..22: note = chemically synthesized
  source 1..22: mol_type = other DNA
gtttgggtgttgtctcatgcta

SEQ ID NO: 67889 - DNA, 22 bp, synthetic construct
  misc_feature 1..22: note = chemically synthesized
  source 1..22: mol_type = other DNA
gggtgttgtctcatgctaagaa

SEQ ID NO: 67890 - DNA, 22 bp, synthetic construct
  misc_feature 1..22: note = chemically synthesized
  source 1..22: mol_type = other DNA
ggtgttgtctcatgctaagaag

SEQ ID NO: 67891 - DNA, 22 bp, synthetic construct
  misc_feature 1..22: note = chemically synthesized
  source 1..22: mol_type = other DNA
tctcatgctaagaaggccctgg

SEQ ID NO: 67892 - DNA, 22 bp, synthetic construct
  misc_feature 1..22: note = chemically synthesized
  source 1..22: mol_type = other DNA
atgctaagaaggccctggacct

SEQ ID NO: 67893 - DNA, 22 bp, synthetic construct
  misc_feature 1..22: note = chemically synthesized
  source 1..22: mol_type = other DNA
agaaggccctggacctgatgga

SEQ ID NO: 67894 - DNA, 22 bp, synthetic construct
  misc_feature 1..22: note = chemically synthesized
  source 1..22: mol_type = other DNA
gacctgatggagagcctggacc

SEQ ID NO: 67895 - DNA, 22 bp, synthetic construct
  misc_feature 1..22: note = chemically synthesized
  source 1..22: mol_type = other DNA
atggagagcctggacctgttcc

SEQ ID NO: 67896 - DNA, 22 bp, synthetic construct
  misc_feature 1..22: note = chemically synthesized
  source 1..22: mol_type = other DNA
gacctgttccctgtccttatca

SEQ ID NO: 67897 - DNA, 22 bp, synthetic construct
  misc_feature 1..22: note = chemically synthesized
  source 1..22: mol_type = other DNA
ttccctgtccttatcaatgaca

SEQ ID NO: 67898 - DNA, 22 bp, synthetic construct
  misc_feature 1..22: note = chemically synthesized
  source 1..22: mol_type = other DNA
cctgtccttatcaatgacagac

SEQ ID NO: 67899 - DNA, 22 bp, synthetic construct
  misc_feature 1..22: note = chemically synthesized
  source 1..22: mol_type = other DNA
tccttatcaatgacagacggag

SEQ ID NO: 67900 - DNA, 22 bp, synthetic construct
  misc_feature 1..22: note = chemically synthesized
  source 1..22: mol_type = other DNA
atcaatgacagacggagggtgg

SEQ ID NO: 67901 - DNA, 22 bp, synthetic construct
  misc_feature 1..22: note = chemically synthesized
  source 1..22: mol_type = other DNA
tcaatgacagacggagggtgga

SEQ ID NO: 67902 - DNA, 22 bp, synthetic construct
  misc_feature 1..22: note = chemically synthesized
  source 1..22: mol_type = other DNA
aatttcctaatggagggatcct

SEQ ID NO: 67903 - DNA, 22 bp, synthetic construct
  misc_feature 1..22: note = chemically synthesized
  source 1..22: mol_type = other DNA
cctaatggagggatccttaggg

SEQ ID NO: 67904 - DNA, 22 bp, synthetic construct
  misc_feature 1..22: note = chemically synthesized
  source 1..22: mol_type = other DNA
ctaatggagggatccttaggga

SEQ ID NO: 67905 - DNA, 22 bp, synthetic construct
  misc_feature 1..22: note = chemically synthesized
  source 1..22: mol_type = other DNA
atggagggatccttagggattc

SEQ ID NO: 67906 - DNA, 22 bp, synthetic construct
  misc_feature 1..22: note = chemically synthesized
  source 1..22: mol_type = other DNA
agggattccctaagcttaattt

SEQ ID NO: 67907 - DNA, 22 bp, synthetic construct
  misc_feature 1..22: note = chemically synthesized
  source 1..22: mol_type = other DNA
gggattccctaagcttaatttg

SEQ ID NO: 67908 - DNA, 22 bp, synthetic construct
  misc_feature 1..22: note = chemically synthesized
  source 1..22: mol_type = other DNA
cctaagcttaatttgtttttga

SEQ ID NO: 67909 - DNA, 22 bp, synthetic construct
  misc_feature 1..22: note = chemically synthesized
  source 1..22: mol_type = other DNA
agcttaatttgtttttgactgt

SEQ ID NO: 67910 - DNA, 22 bp, synthetic construct
  misc_feature 1..22: note = chemically synthesized
  source 1..22: mol_type = other DNA
aatttgtttttgactgttccag

SEQ ID NO: 67911 - DNA, 22 bp, synthetic construct
  misc_feature 1..22: note = chemically synthesized
  source 1..22: mol_type = other DNA
atttgtttttgactgttccagt

SEQ ID NO: 67912 - DNA, 22 bp, synthetic construct
  misc_feature 1..22: note = chemically synthesized
  source 1..22: mol_type = other DNA
gtttttgactgttccagtccta

SEQ ID NO: 67913 - DNA, 22 bp, synthetic construct
  misc_feature 1..22: note = chemically synthesized
  source 1..22: mol_type = other DNA
tttttgactgttccagtcctaa

SEQ ID NO: 67914 - DNA, 22 bp, synthetic construct
  misc_feature 1..22: note = chemically synthesized
  source 1..22: mol_type = other DNA
ttgactgttccagtcctaaagg

SEQ ID NO: 67915 - DNA, 22 bp, synthetic construct
  misc_feature 1..22: note = chemically synthesized
  source 1..22: mol_type = other DNA
tgactgttccagtcctaaagga

SEQ ID NO: 67916 - DNA, 22 bp, synthetic construct
  misc_feature 1..22: note = chemically synthesized
  source 1..22: mol_type = other DNA
gactgttccagtcctaaaggag

SEQ ID NO: 67917 - DNA, 22 bp, synthetic construct
  misc_feature 1..22: note = chemically synthesized
  source 1..22: mol_type = other DNA
actgttccagtcctaaaggagg

SEQ ID NO: 67918 - DNA, 22 bp, synthetic construct
  misc_feature 1..22: note = chemically synthesized
  source 1..22: mol_type = other DNA
ttccagtcctaaaggaggtggg

SEQ ID NO: 67919 - DNA, 22 bp, synthetic construct
  misc_feature 1..22: note = chemically synthesized
  source 1..22: mol_type = other DNA
cagtcctaaaggaggtgggtcc

SEQ ID NO: 67920 - DNA, 22 bp, synthetic construct
  misc_feature 1..22: note = chemically synthesized
  source 1..22: mol_type = other DNA
aaggaggtgggtcctggacagg

SEQ ID NO: 67921 - DNA, 22 bp, synthetic construct
  misc_feature 1..22: note = chemically synthesized
  source 1..22: mol_type = other DNA
gacaggagggaaaacagcctca

SEQ ID NO: 67922 - DNA, 22 bp, synthetic construct
  misc_feature 1..22: note = chemically synthesized
  source 1..22: mol_type = other DNA
atggcccatgggtctctgccca

SEQ ID NO: 67923 - DNA, 22 bp, synthetic construct
  misc_feature 1..22: note = chemically synthesized
  source 1..22: mol_type = other DNA
tgcccagggaatttcaaagctt

SEQ ID NO: 67924 - DNA, 22 bp, synthetic construct
  misc_feature 1..22: note = chemically synthesized
  source 1..22: mol_type = other DNA
cccagggaatttcaaagcttcc

SEQ ID NO: 67925 - DNA, 22 bp, synthetic construct
  misc_feature 1..22: note = chemically synthesized
  source 1..22: mol_type = other DNA
caaagcttccagcgttcatact

SEQ ID NO: 67926 - DNA, 22 bp, synthetic construct
  misc_feature 1..22: note = chemically synthesized
  source 1..22: mol_type = other DNA
aaagcttccagcgttcatactt

SEQ ID NO: 67927 - DNA, 22 bp, synthetic construct
  misc_feature 1..22: note = chemically synthesized
  source 1..22: mol_type = other DNA
ccagcgttcatacttcccttac

SEQ ID NO: 67928 - DNA, 22 bp, synthetic construct
  misc_feature 1..22: note = chemically synthesized
  source 1..22: mol_type = other DNA
cagcgttcatacttcccttacc

SEQ ID NO: 67929 - DNA, 22 bp, synthetic construct
  misc_feature 1..22: note = chemically synthesized
  source 1..22: mol_type = other DNA
atacttcccttaccctaagaca

SEQ ID NO: 67930 - DNA, 22 bp, synthetic construct
  misc_feature 1..22: note = chemically synthesized
  source 1..22: mol_type = other DNA
cccttaccctaagacagcagtg

SEQ ID NO: 67931 - DNA, 22 bp, synthetic construct
  misc_feature 1..22: note = chemically synthesized
  source 1..22: mol_type = other DNA
ccttaccctaagacagcagtgc

SEQ ID NO: 67932 - DNA, 22 bp, synthetic construct
  misc_feature 1..22: note = chemically synthesized
  source 1..22: mol_type = other DNA
accctaagacagcagtgctgat

SEQ ID NO: 67933 - DNA, 22 bp, synthetic construct
  misc_feature 1..22: note = chemically synthesized
  source 1..22: mol_type = other DNA
ccctaagacagcagtgctgatt

SEQ ID NO: 67934 - DNA, 22 bp, synthetic construct
  misc_feature 1..22: note = chemically synthesized
  source 1..22: mol_type = other DNA
agacagcagtgctgattcagct

SEQ ID NO: 67935 - DNA, 22 bp, synthetic construct
  misc_feature 1..22: note = chemically synthesized
  source 1..22: mol_type = other DNA
attcagcttgagtgtgcatgag

SEQ ID NO: 67936 - DNA, 22 bp, synthetic construct
  misc_feature 1..22: note = chemically synthesized
  source 1..22: mol_type = other DNA
agcttgagtgtgcatgagaatc

SEQ ID NO: 67937 - DNA, 22 bp, synthetic construct
  misc_feature 1..22: note = chemically synthesized
  source 1..22: mol_type = other DNA
gagtgtgcatgagaatcacctg

SEQ ID NO: 67938 - DNA, 22 bp, synthetic construct
  misc_feature 1..22: note = chemically synthesized
  source 1..22: mol_type = other DNA
agtgtgcatgagaatcacctgg

SEQ ID NO: 67939 - DNA, 22 bp, synthetic construct
  misc_feature 1..22: note = chemically synthesized
  source 1..22: mol_type = other DNA
gagaatttattcaacatagaag

SEQ ID NO: 67940 - DNA, 22 bp, synthetic construct
  misc_feature 1..22: note = chemically synthesized
  source 1..22: mol_type = other DNA
attcaacatagaaggctgcttc

SEQ ID NO: 67941 - DNA, 22 bp, synthetic construct
  misc_feature 1..22: note = chemically synthesized
  source 1..22: mol_type = other DNA
ttcaacatagaaggctgcttcc

SEQ ID NO: 67942 - DNA, 22 bp, synthetic construct
  misc_feature 1..22: note = chemically synthesized
  source 1..22: mol_type = other DNA
aacatagaaggctgcttcccca

SEQ ID NO: 67943 - DNA, 22 bp, synthetic construct
  misc_feature 1..22: note = chemically synthesized
  source 1..22: mol_type = other DNA
cttccccaccctcaatttctga

SEQ ID NO: 67944 - DNA, 22 bp, synthetic construct
  misc_feature 1..22: note = chemically synthesized
  source 1..22: mol_type = other DNA
ccccaccctcaatttctgattc

SEQ ID NO: 67945 - DNA, 22 bp, synthetic construct
  misc_feature 1..22: note = chemically synthesized
  source 1..22: mol_type = other DNA
cccaccctcaatttctgattca

SEQ ID NO: 67946 - DNA, 22 bp, synthetic construct
  misc_feature 1..22: note = chemically synthesized
  source 1..22: mol_type = other DNA
aatttctgattcagtaagtctg

SEQ ID NO: 67947 - DNA, 22 bp, synthetic construct
  misc_feature 1..22: note = chemically synthesized
  source 1..22: mol_type = other DNA
ctgattcagtaagtctgaggtg

SEQ ID NO: 67948 - DNA, 22 bp, synthetic construct
  misc_feature 1..22: note = chemically synthesized
  source 1..22: mol_type = other DNA
tgattcagtaagtctgaggtgg

SEQ ID NO: 67949 - DNA, 22 bp, synthetic construct
  misc_feature 1..22: note = chemically synthesized
  source 1..22: mol_type = other DNA
attcagtaagtctgaggtggtg

SEQ ID NO: 67950 - DNA, 22 bp, synthetic construct
  misc_feature 1..22: note = chemically synthesized
  source 1..22: mol_type = other DNA
agtaagtctgaggtggtgccca

SEQ ID NO: 67951 - DNA, 22 bp, synthetic construct
  misc_feature 1..22: note = chemically synthesized
  source 1..22: mol_type = other DNA
aggtggtgcccaagaatttgca

SEQ ID NO: 67952 - DNA, 22 bp, synthetic construct
  misc_feature 1..22: note = chemically synthesized
  source 1..22: mol_type = other DNA
gcattttgaacaaactcccagg

SEQ ID NO: 67953 - DNA, 22 bp, synthetic construct
  misc_feature 1..22: note = chemically synthesized
  source 1..22: mol_type = other DNA
cattttgaacaaactcccaggt

SEQ ID NO: 67954 - DNA, 22 bp, synthetic construct
  misc_feature 1..22: note = chemically synthesized
  source 1..22: mol_type = other DNA
tgaacaaactcccaggtgatgc

SEQ ID NO: 67955 - DNA, 22 bp, synthetic construct
  misc_feature 1..22: note = chemically synthesized
  source 1..22: mol_type = other DNA
gaacaaactcccaggtgatgct

SEQ ID NO: 67956 - DNA, 22 bp, synthetic construct
  misc_feature 1..22: note = chemically synthesized
  source 1..22: mol_type = other DNA
aacaaactcccaggtgatgctg

SEQ ID NO: 67957 - DNA, 22 bp, synthetic construct
  misc_feature 1..22: note = chemically synthesized
  source 1..22: mol_type = other DNA
ccaggtgatgctgatcgggggt

SEQ ID NO: 67958 - DNA, 22 bp, synthetic construct
  misc_feature 1..22: note = chemically synthesized
  source 1..22: mol_type = other DNA
atcgggggtgggcctgggtctg

SEQ ID NO: 67959 - DNA, 22 bp, synthetic construct
  misc_feature 1..22: note = chemically synthesized
  source 1..22: mol_type = other DNA
ggtctgcgctgtgagaatcact

SEQ ID NO: 67960 - DNA, 22 bp, synthetic construct
  misc_feature 1..22: note = chemically synthesized
  source 1..22: mol_type = other DNA
cgctgtgagaatcacttgccta

SEQ ID NO: 67961 - DNA, 22 bp, synthetic construct
  misc_feature 1..22: note = chemically synthesized
  source 1..22: mol_type = other DNA
tgagaatcacttgcctaagagc

SEQ ID NO: 67962 - DNA, 22 bp, synthetic construct
  misc_feature 1..22: note = chemically synthesized
  source 1..22: mol_type = other DNA
gcctaagagcactaacaaagaa

SEQ ID NO: 67963 - DNA, 22 bp, synthetic construct
  misc_feature 1..22: note = chemically synthesized
  source 1..22: mol_type = other DNA
cctaagagcactaacaaagaaa

SEQ ID NO: 67964 - DNA, 22 bp, synthetic construct
  misc_feature 1..22: note = chemically synthesized
  source 1..22: mol_type = other DNA
agagcactaacaaagaaaaaaa

SEQ ID NO: 67965 - DNA, 22 bp, synthetic construct
  misc_feature 1..22: note = chemically synthesized
  source 1..22: mol_type = other DNA
acaaagaaaaaaagaggacata

SEQ ID NO: 67966 - DNA, 22 bp, synthetic construct
  misc_feature 1..22: note = chemically synthesized
  source 1..22: mol_type = other DNA
gatcacccacttcctagccagc

SEQ ID NO: 67967 - DNA, 22 bp, synthetic construct
  misc_feature 1..22: note = chemically synthesized
  source 1..22: mol_type = other DNA
cctagccagcaaccagagccca

SEQ ID NO: 67968 - DNA, 22 bp, synthetic construct
  misc_feature 1..22: note = chemically synthesized
  source 1..22: mol_type = other DNA
ctagccagcaaccagagcccat

SEQ ID NO: 67969 - DNA, 22 bp, synthetic construct
  misc_feature 1..22: note = chemically synthesized
  source 1..22: mol_type = other DNA
gccagcaaccagagcccatctc

SEQ ID NO: 67970 - DNA, 22 bp, synthetic construct
  misc_feature 1..22: note = chemically synthesized
  source 1..22: mol_type = other DNA
tggctggggagaatgaaagcga

SEQ ID NO: 67971 - DNA, 22 bp, synthetic construct
  misc_feature 1..22: note = chemically synthesized
  source 1..22: mol_type = other DNA
gctggggagaatgaaagcgaag

SEQ ID NO: 67972 - DNA, 22 bp, synthetic construct
  misc_feature 1..22: note = chemically synthesized
  source 1..22: mol_type = other DNA
gggagaatgaaagcgaaggtgg

SEQ ID NO: 67973 - DNA, 22 bp, synthetic construct
  misc_feature 1..22: note = chemically synthesized
  source 1..22: mol_type = other DNA
aaccaggggcagctccttttcc

SEQ ID NO: 67974 - DNA, 22 bp, synthetic construct
  misc_feature 1..22: note = chemically synthesized
  source 1..22: mol_type = other DNA
cttttccccaccttggcctggg

SEQ ID NO: 67975 - DNA, 22 bp, synthetic construct
  misc_feature 1..22: note = chemically synthesized
  source 1..22: mol_type = other DNA
ttccccaccttggcctgggaag

SEQ ID NO: 67976 - DNA, 22 bp, synthetic construct
  misc_feature 1..22: note = chemically synthesized
  source 1..22: mol_type = other DNA
tccccaccttggcctgggaagg

SEQ ID NO: 67977 - DNA, 22 bp, synthetic construct
  misc_feature 1..22: note = chemically synthesized
  source 1..22: mol_type = other DNA
ccccaccttggcctgggaaggc

SEQ ID NO: 67978 - DNA, 22 bp, synthetic construct
  misc_feature 1..22: note = chemically synthesized
  source 1..22: mol_type = other DNA
cccaccttggcctgggaaggca

SEQ ID NO: 67979 - DNA, 22 bp, synthetic construct
  misc_feature 1..22: note = chemically synthesized
  source 1..22: mol_type = other DNA
ggcctgggaaggcagagctgct

SEQ ID NO: 67980 - DNA, 22 bp, synthetic construct
  misc_feature 1..22: note = chemically synthesized
  source 1..22: mol_type = other DNA
gcctgggaaggcagagctgctc

SEQ ID NO: 67981 - DNA, 22 bp, synthetic construct
  misc_feature 1..22: note = chemically synthesized
  source 1..22: mol_type = other DNA
ggaaggcagagctgctcctcga

SEQ ID NO: 67982 - DNA, 22 bp, synthetic construct
  misc_feature 1..22: note = chemically synthesized
  source 1..22: mol_type = other DNA
ctcctcgagtttgacgctcaga

SEQ ID NO: 67983 - DNA, 22 bp, synthetic construct
  misc_feature 1..22: note = chemically synthesized
  source 1..22: mol_type = other DNA
ctcgagtttgacgctcagaagc

SEQ ID NO: 67984 - DNA, 22 bp, synthetic construct
  misc_feature 1..22: note = chemically synthesized
  source 1..22: mol_type = other DNA
gagtttgacgctcagaagcatt

SEQ ID NO: 67985 - DNA, 22 bp, synthetic construct
  misc_feature 1..22: note = chemically synthesized
  source 1..22: mol_type = other DNA
gacgctcagaagcattaattgt

SEQ ID NO: 67986 - DNA, 22 bp, synthetic construct
  misc_feature 1..22: note = chemically synthesized
  source 1..22: mol_type = other DNA
acgctcagaagcattaattgtg

SEQ ID NO: 67987 - DNA, 22 bp, synthetic construct
  misc_feature 1..22: note = chemically synthesized
  source 1..22: mol_type = other DNA
agaagcattaattgtgatactt

SEQ ID NO: 67988 - DNA, 22 bp, synthetic construct
  misc_feature 1..22: note = chemically synthesized
  source 1..22: mol_type = other DNA
attgtgatactttactttgcct

SEQ ID NO: 67989 - DNA, 22 bp, synthetic construct
  misc_feature 1..22: note = chemically synthesized
  source 1..22: mol_type = other DNA
tgatactttactttgcctaagc

SEQ ID NO: 67990 - DNA, 22 bp, synthetic construct
  misc_feature 1..22: note = chemically synthesized
  source 1..22: mol_type = other DNA
tactttgcctaagccgtgatga

SEQ ID NO: 67991 - DNA, 22 bp, synthetic construct
  misc_feature 1..22: note = chemically synthesized
  source 1..22: mol_type = other DNA
actttgcctaagccgtgatgaa

SEQ ID NO: 67992 - DNA, 22 bp, synthetic construct
  misc_feature 1..22: note = chemically synthesized
  source 1..22: mol_type = other DNA
ctttgcctaagccgtgatgaaa

SEQ ID NO: 67993 - DNA, 22 bp, synthetic construct
  misc_feature 1..22: note = chemically synthesized
  source 1..22: mol_type = other DNA
tgcctaagccgtgatgaaataa

SEQ ID NO: 67994 - DNA, 22 bp, synthetic construct
  misc_feature 1..22: note = chemically synthesized
  source 1..22: mol_type = other DNA
gcctaagccgtgatgaaataat

SEQ ID NO: 67995 - DNA, 22 bp, synthetic construct
  misc_feature 1..22: note = chemically synthesized
  source 1..22: mol_type = other DNA
cctaagccgtgatgaaataatt

SEQ ID NO: 67996 - DNA, 22 bp, synthetic construct
  misc_feature 1..22: note = chemically synthesized
  source 1..22: mol_type = other DNA
agccgtgatgaaataattgaag

SEQ ID NO: 67997 - DNA, 22 bp, synthetic construct
  misc_feature 1..22: note = chemically synthesized
  source 1..22: mol_type = other DNA
aaggcatcatagcaagaagtta

SEQ ID NO: 67998 - DNA, 22 bp, synthetic construct
  misc_feature 1..22: note = chemically synthesized
  source 1..22: mol_type = other DNA
agccctagggaggctattaaca

SEQ ID NO: 67999 - DNA, 22 bp, synthetic construct
  misc_feature 1..22: note = chemically synthesized
  source 1..22: mol_type = other DNA
gggaggctattaacaatttagc

SEQ ID NO: 68000 - DNA, 22 bp, synthetic construct
  misc_feature 1..22: note = chemically synthesized
  source 1..22: mol_type = other DNA
ttaacaatttagcatttccagt

SEQ ID NO: 68001 - DNA, 22 bp, synthetic construct
  misc_feature 1..22: note = chemically synthesized
  source 1..22: mol_type = other DNA
acaatttagcatttccagttca

SEQ ID NO: 68002 - DNA, 22 bp, synthetic construct
  misc_feature 1..22: note = chemically synthesized
  source 1..22: mol_type = other DNA
agcatttccagttcatgtggga

SEQ ID NO: 68003 - DNA, 22 bp, synthetic construct
  misc_feature 1..22: note = chemically synthesized
  source 1..22: mol_type = other DNA
gcatttccagttcatgtgggaa

SEQ ID NO: 68004 - DNA, 22 bp, synthetic construct
  misc_feature 1..22: note = chemically synthesized
  source 1..22: mol_type = other DNA
ccagttcatgtgggaatgtcga

SEQ ID NO: 68005 - DNA, 22 bp, synthetic construct
  misc_feature 1..22: note = chemically synthesized
  source 1..22: mol_type = other DNA
cagttcatgtgggaatgtcgat

SEQ ID NO: 68006 - DNA, 22 bp, synthetic construct
  misc_feature 1..22: note = chemically synthesized
  source 1..22: mol_type = other DNA
atgtgggaatgtcgattttact

SEQ ID NO: 68007 - DNA, 22 bp, synthetic construct
  misc_feature 1..22: note = chemically synthesized
  source 1..22: mol_type = other DNA
tacttaccaaagagaatattat

SEQ ID NO: 68008 - DNA, 22 bp, synthetic construct
  misc_feature 1..22: note = chemically synthesized
  source 1..22: mol_type = other DNA
acttaccaaagagaatattatg

SEQ ID NO: 68009 - DNA, 22 bp, synthetic construct
  misc_feature 1..22: note = chemically synthesized
  source 1..22: mol_type = other DNA
cttaccaaagagaatattatgg

SEQ ID NO: 68010 - DNA, 22 bp, synthetic construct
  misc_feature 1..22: note = chemically synthesized
  source 1..22: mol_type = other DNA
accaaagagaatattatggatg

SEQ ID NO: 68011 - DNA, 22 bp, synthetic construct
  misc_feature 1..22: note = chemically synthesized
  source 1..22: mol_type = other DNA
ccaaagagaatattatggatgt

SEQ ID NO: 68012 - DNA, 22 bp, synthetic construct
  misc_feature 1..22: note = chemically synthesized
  source 1..22: mol_type = other DNA
tggatgtgtttagtggaagaag

SEQ ID NO: 68013 - DNA, 22 bp, synthetic construct
  misc_feature 1..22: note = chemically synthesized
  source 1..22: mol_type = other DNA
agtggaagaagcagcagaatca

SEQ ID NO: 68014 - DNA, 22 bp, synthetic construct
  misc_feature 1..22: note = chemically synthesized
  source 1..22: mol_type = other DNA
gtggaagaagcagcagaatcag

SEQ ID NO: 68015 - DNA, 22 bp, synthetic construct
  misc_feature 1..22: note = chemically synthesized
  source 1..22: mol_type = other DNA
gggtccccagttggctttgctt

SEQ ID NO: 68016 - DNA, 22 bp, synthetic construct
  misc_feature 1..22: note = chemically synthesized
  source 1..22: mol_type = other DNA
gctttgctttgaccctcttcct

SEQ ID NO: 68017 - DNA, 22 bp, synthetic construct
  misc_feature 1..22: note = chemically synthesized
  source 1..22: mol_type = other DNA
tgctttgaccctcttcctgaag

SEQ ID NO: 68018 - DNA, 22 bp, synthetic construct
  misc_feature 1..22: note = chemically synthesized
  source 1..22: mol_type = other DNA
gctttgaccctcttcctgaagg

SEQ ID NO: 68019 - DNA, 22 bp, synthetic construct
  misc_feature 1..22: note = chemically synthesized
  source 1..22: mol_type = other DNA
ctttgaccctcttcctgaagga

SEQ ID NO: 68020 - DNA, 22 bp, synthetic construct
  misc_feature 1..22: note = chemically synthesized
  source 1..22: mol_type = other DNA
tgaccctcttcctgaaggaaga

SEQ ID NO: 68021 - DNA, 22 bp, synthetic construct
  misc_feature 1..22: note = chemically synthesized
  source 1..22: mol_type = other DNA
gaccctcttcctgaaggaagat

SEQ ID NO: 68022 - DNA, 22 bp, synthetic construct
  misc_feature 1..22: note = chemically synthesized
  source 1..22: mol_type = other DNA
accctcttcctgaaggaagata

SEQ ID NO: 68023 - DNA, 22 bp, synthetic construct
  misc_feature 1..22: note = chemically synthesized
  source 1..22: mol_type = other DNA
ttcctgaaggaagataaatgca

SEQ ID NO: 68024 - DNA, 22 bp, synthetic construct
  misc_feature 1..22: note = chemically synthesized
  source 1..22: mol_type = other DNA
cctgaaggaagataaatgcaag

SEQ ID NO: 68025 - DNA, 22 bp, synthetic construct
  misc_feature 1..22: note = chemically synthesized
  source 1..22: mol_type = other DNA
ctgaaggaagataaatgcaagg

SEQ ID NO: 68026 - DNA, 22 bp, synthetic construct
  misc_feature 1..22: note = chemically synthesized
  source 1..22: mol_type = other DNA
aaggaagataaatgcaagggtg

SEQ ID NO: 68027 - DNA, 22 bp, synthetic construct
  misc_feature 1..22: note = chemically synthesized
  source 1..22: mol_type = other DNA
acaaagacagtgtgcttttttt

SEQ ID NO: 68028 - DNA, 22 bp, synthetic construct
  misc_feature 1..22: note = chemically synthesized
  source 1..22: mol_type = other DNA
tttttctaaagtaaatagcttc

SEQ ID NO: 68029 - DNA, 22 bp, synthetic construct
  misc_feature 1..22: note = chemically synthesized
  source 1..22: mol_type = other DNA
ttttctaaagtaaatagcttct

SEQ ID NO: 68030 - DNA, 22 bp, synthetic construct
  misc_feature 1..22: note = chemically synthesized
  source 1..22: mol_type = other DNA
tttctaaagtaaatagcttctt

SEQ ID NO: 68031 - DNA, 22 bp, synthetic construct
  misc_feature 1..22: note = chemically synthesized
  source 1..22: mol_type = other DNA
ttctaaagtaaatagcttctta

SEQ ID NO: 68032 - DNA, 22 bp, synthetic construct
  misc_feature 1..22: note = chemically synthesized
  source 1..22: mol_type = other DNA
tctaaagtaaatagcttcttag

SEQ ID NO: 68033 - DNA, 22 bp, synthetic construct
  misc_feature 1..22: note = chemically synthesized
  source 1..22: mol_type = other DNA
ctaaagtaaatagcttcttagg

SEQ ID NO: 68034 - DNA, 22 bp, synthetic construct
  misc_feature 1..22: note = chemically synthesized
  source 1..22: mol_type = other DNA
taaagtaaatagcttcttaggc

SEQ ID NO: 68035 - DNA, 22 bp, synthetic construct
  misc_feature 1..22: note = chemically synthesized
  source 1..22: mol_type = other DNA
aagtaaatagcttcttaggctg

SEQ ID NO: 68036 - DNA, 22 bp, synthetic construct
  misc_feature 1..22: note = chemically synthesized
  source 1..22: mol_type = other DNA
cttaggctgatagaaatgtttt

SEQ ID NO: 68037 - DNA, 22 bp, synthetic construct
  misc_feature 1..22: note = chemically synthesized
  source 1..22: mol_type = other DNA
ttaggctgatagaaatgttttt

SEQ ID NO: 68038 - DNA, 22 bp, synthetic construct
  misc_feature 1..22: note = chemically synthesized
  source 1..22: mol_type = other DNA
aggctgatagaaatgtttttag

SEQ ID NO: 68039 - DNA, 22 bp, synthetic construct
  misc_feature 1..22: note = chemically synthesized
  source 1..22: mol_type = other DNA
ggctgatagaaatgtttttagc

SEQ ID NO: 68040 - DNA, 22 bp, synthetic construct
  misc_feature 1..22: note = chemically synthesized
  source 1..22: mol_type = other DNA
atagaaatgtttttagctgtct

SEQ ID NO: 68041 - DNA, 22 bp, synthetic construct
  misc_feature 1..22: note = chemically synthesized
  source 1..22: mol_type = other DNA
ttagctgtctaattctgcaggg

SEQ ID NO: 68042 - DNA, 22 bp, synthetic construct
  misc_feature 1..22: note = chemically synthesized
  source 1..22: mol_type = other DNA
tagctgtctaattctgcagggg

SEQ ID NO: 68043 - DNA, 22 bp, synthetic construct
  misc_feature 1..22: note = chemically synthesized
  source 1..22: mol_type = other DNA
agctgtctaattctgcagggga

SEQ ID NO: 68044 - DNA, 22 bp, synthetic construct
  misc_feature 1..22: note = chemically synthesized
  source 1..22: mol_type = other DNA
gctgtctaattctgcaggggaa

SEQ ID NO: 68045 - DNA, 22 bp, synthetic construct
  misc_feature 1..22: note = chemically synthesized
  source 1..22: mol_type = other DNA
tctaattctgcaggggaagcag

SEQ ID NO: 68046 - DNA, 22 bp, synthetic construct
  misc_feature 1..22: note = chemically synthesized
  source 1..22: mol_type = other DNA
attctgcaggggaagcagaggt

SEQ ID NO: 68047 - DNA, 22 bp, synthetic construct
  misc_feature 1..22: note = chemically synthesized
  source 1..22: mol_type = other DNA
tgcaggggaagcagaggtagag

SEQ ID NO: 68048 - DNA, 22 bp, synthetic construct
  misc_feature 1..22: note = chemically synthesized
  source 1..22: mol_type = other DNA
caggggaagcagaggtagaggg

SEQ ID NO: 68049 - DNA, 22 bp, synthetic construct
  misc_feature 1..22: note = chemically synthesized
  source 1..22: mol_type = other DNA
gttttccaattgtgagaccaag

SEQ ID NO: 68050 - DNA, 22 bp, synthetic construct
  misc_feature 1..22: note = chemically synthesized
  source 1..22: mol_type = other DNA
ttttccaattgtgagaccaagt

SEQ ID NO: 68051 - DNA, 22 bp, synthetic construct
  misc_feature 1..22: note = chemically synthesized
  source 1..22: mol_type = other DNA
tccaattgtgagaccaagtcag

SEQ ID NO: 68052 - DNA, 22 bp, synthetic construct
  misc_feature 1..22: note = chemically synthesized
  source 1..22: mol_type = other DNA
ccaattgtgagaccaagtcagt

SEQ ID NO: 68053 - DNA, 22 bp, synthetic construct
  misc_feature 1..22: note = chemically synthesized
  source 1..22: mol_type = other DNA
caattgtgagaccaagtcagtt

SEQ ID NO: 68054 - DNA, 22 bp, synthetic construct
  misc_feature 1..22: note = chemically synthesized
  source 1..22: mol_type = other DNA
tgagaccaagtcagttcattgg

SEQ ID NO: 68055 - DNA, 22 bp, synthetic construct
  misc_feature 1..22: note = chemically synthesized
  source 1..22: mol_type = other DNA
attggcacctttcgaaagcccc

SEQ ID NO: 68056 - DNA, 22 bp, synthetic construct
  misc_feature 1..22: note = chemically synthesized
  source 1..22: mol_type = other DNA
gcacctttcgaaagccccatgt

SEQ ID NO: 68057 - DNA, 22 bp, synthetic construct
  misc_feature 1..22: note = chemically synthesized
  source 1..22: mol_type = other DNA
tcgaaagccccatgtagcgctg

SEQ ID NO: 68058 - DNA, 22 bp, synthetic construct
  misc_feature 1..22: note = chemically synthesized
  source 1..22: mol_type = other DNA
cgaaagccccatgtagcgctgc

SEQ ID NO: 68059 - DNA, 22 bp, synthetic construct
  misc_feature 1..22: note = chemically synthesized
  source 1..22: mol_type = other DNA
gaaagccccatgtagcgctgct

SEQ ID NO: 68060 - DNA, 22 bp, synthetic construct
  misc_feature 1..22: note = chemically synthesized
  source 1..22: mol_type = other DNA
ctgggctggaccctcccccaag

SEQ ID NO: 68061 - DNA, 22 bp, synthetic construct
  misc_feature 1..22: note = chemically synthesized
  source 1..22: mol_type = other DNA
ggctggaccctcccccaagacg

SEQ ID NO: 68062 - DNA, 22 bp, synthetic construct
  misc_feature 1..22: note = chemically synthesized
  source 1..22: mol_type = other DNA
gaccctcccccaagacggttaa

SEQ ID NO: 68063 - DNA, 22 bp, synthetic construct
  misc_feature 1..22: note = chemically synthesized
  source 1..22: mol_type = other DNA
ccccaagacggttaagtactgc

SEQ ID NO: 68064 - DNA, 22 bp, synthetic construct
  misc_feature 1..22: note = chemically synthesized
  source 1..22: mol_type = other DNA
agtactgcttaatggatcagta

SEQ ID NO: 68065 - DNA, 22 bp, synthetic construct
  misc_feature 1..22: note = chemically synthesized
  source 1..22: mol_type = other DNA
cttaatggatcagtagaaacag

SEQ ID NO: 68066 - DNA, 22 bp, synthetic construct
  misc_feature 1..22: note = chemically synthesized
  source 1..22: mol_type = other DNA
aatggatcagtagaaacaggac

SEQ ID NO: 68067 - DNA, 22 bp, synthetic construct
  misc_feature 1..22: note = chemically synthesized
  source 1..22: mol_type = other DNA
atggatcagtagaaacaggacc

SEQ ID NO: 68068 - DNA, 22 bp, synthetic construct
  misc_feature 1..22: note = chemically synthesized
  source 1..22: mol_type = other DNA
cttgttgggcagtgaagaccac

SEQ ID NO: 68069 - DNA, 22 bp, synthetic construct
  misc_feature 1..22: note = chemically synthesized
  source 1..22: mol_type = other DNA
ttgttgggcagtgaagaccacg

SEQ ID NO: 68070 - DNA, 22 bp, synthetic construct
  misc_feature 1..22: note = chemically synthesized
  source 1..22: mol_type = other DNA
gttgggcagtgaagaccacggc

SEQ ID NO: 68071 - DNA, 22 bp, synthetic construct
  misc_feature 1..22: note = chemically synthesized
  source 1..22: mol_type = other DNA
ttgggcagtgaagaccacggca

SEQ ID NO: 68072 - DNA, 22 bp, synthetic construct
  misc_feature 1..22: note = chemically synthesized
  source 1..22: mol_type = other DNA
ggcagtgaagaccacggcagga

SEQ ID NO: 68073 - DNA, 22 bp, synthetic construct
  misc_feature 1..22: note = chemically synthesized
  source 1..22: mol_type = other DNA
ccaggaaagaccactggatcag

SEQ ID NO: 68074 - DNA, 22 bp, synthetic construct
  misc_feature 1..22: note = chemically synthesized
  source 1..22: mol_type = other DNA
gatcaggagtcaggagattaat

SEQ ID NO: 68075 - DNA, 22 bp, synthetic construct
  misc_feature 1..22: note = chemically synthesized
  source 1..22: mol_type = other DNA
attctaatcttcacattgtggt

SEQ ID NO: 68076 - DNA, 22 bp, synthetic construct
  misc_feature 1..22: note = chemically synthesized
  source 1..22: mol_type = other DNA
taatcttcacattgtggttaat

SEQ ID NO: 68077 - DNA, 22 bp, synthetic construct
  misc_feature 1..22: note = chemically synthesized
  source 1..22: mol_type = other DNA
atcttcacattgtggttaatca

SEQ ID NO: 68078 - DNA, 22 bp, synthetic construct
  misc_feature 1..22: note = chemically synthesized
  source 1..22: mol_type = other DNA
cacattgtggttaatcatcagt

SEQ ID NO: 68079 - DNA, 22 bp, synthetic construct
  misc_feature 1..22: note = chemically synthesized
  source 1..22: mol_type = other DNA
acattgtggttaatcatcagtg

SEQ ID NO: 68080 - DNA, 22 bp, synthetic construct
  misc_feature 1..22: note = chemically synthesized
  source 1..22: mol_type = other DNA
tggttaatcatcagtgtagcca

SEQ ID NO: 68081 - DNA, 22 bp, synthetic construct
  misc_feature 1..22: note = chemically synthesized
  source 1..22: mol_type = other DNA
atcatcagtgtagccatgggca

SEQ ID NO: 68082 - DNA, 22 bp, synthetic construct
  misc_feature 1..22: note = chemically synthesized
  source 1..22: mol_type = other DNA
aatttctcatggcctcagtttc

SEQ ID NO: 68083 - DNA, 22 bp, synthetic construct
  misc_feature 1..22: note = chemically synthesized
  source 1..22: mol_type = other DNA
atttctcatggcctcagtttcc

SEQ ID NO: 68084 - DNA, 22 bp, synthetic construct
  misc_feature 1..22: note = chemically synthesized
  source 1..22: mol_type = other DNA
ctcatggcctcagtttccccat

SEQ ID NO: 68085 - DNA, 22 bp, synthetic construct
  misc_feature 1..22: note = chemically synthesized
  source 1..22: mol_type = other DNA
tcatggcctcagtttccccatc

SEQ ID NO: 68086 - DNA, 22 bp, synthetic construct
  misc_feature 1..22: note = chemically synthesized
  source 1..22: mol_type = other DNA
atggcctcagtttccccatctg

SEQ ID NO: 68087 - DNA, 22 bp, synthetic construct
  misc_feature 1..22: note = chemically synthesized
  source 1..22: mol_type = other DNA
agtttccccatctgtaaaatga

SEQ ID NO: 68088 - DNA, 22 bp, synthetic construct
  misc_feature 1..22: note = chemically synthesized
  source 1..22: mol_type = other DNA
ccccatctgtaaaatgaaggga

SEQ ID NO: 68089 - DNA, 22 bp, synthetic construct
  misc_feature 1..22: note = chemically synthesized
  source 1..22: mol_type = other DNA
cccatctgtaaaatgaagggac

SEQ ID NO: 68090 - DNA, 22 bp, synthetic construct
  misc_feature 1..22: note = chemically synthesized
  source 1..22: mol_type = other DNA
taaaatgaagggacagacttga

SEQ ID NO: 68091 - DNA, 22 bp, synthetic construct
  misc_feature 1..22: note = chemically synthesized
  source 1..22: mol_type = other DNA
gatgatagctagggttttttac

SEQ ID NO: 68092 - DNA, 22 bp, synthetic construct
  misc_feature 1..22: note = chemically synthesized
  source 1..22: mol_type = other DNA
atgatagctagggttttttaca

SEQ ID NO: 68093 - DNA, 22 bp, synthetic construct
  misc_feature 1..22: note = chemically synthesized
  source 1..22: mol_type = other DNA
gggttttttacaacttagaaaa

SEQ ID NO: 68094 - DNA, 22 bp, synthetic construct
  misc_feature 1..22: note = chemically synthesized
  source 1..22: mol_type = other DNA
tttacaacttagaaaacaaaaa

SEQ ID NO: 68095 - DNA, 22 bp, synthetic construct
  misc_feature 1..22: note = chemically synthesized
  source 1..22: mol_type = other DNA
ttacaacttagaaaacaaaaac

SEQ ID NO: 68096 - DNA, 22 bp, synthetic construct
  misc_feature 1..22: note = chemically synthesized
  source 1..22: mol_type = other DNA
tacaacttagaaaacaaaaaca

SEQ ID NO: 68097 - DNA, 22 bp, synthetic construct
  misc_feature 1..22: note = chemically synthesized
  source 1..22: mol_type = other DNA
acaacttagaaaacaaaaacaa

SEQ ID NO: 68098 - DNA, 22 bp, synthetic construct
  misc_feature 1..22: note = chemically synthesized
  source 1..22: mol_type = other DNA
caacttagaaaacaaaaacaaa

SEQ ID NO: 68099 - DNA, 22 bp, synthetic construct
  misc_feature 1..22: note = chemically synthesized
  source 1..22: mol_type = other DNA
agaaaacaaaaacaaaaacaaa

SEQ ID NO: 68100 - DNA, 22 bp, synthetic construct
  misc_feature 1..22: note = chemically synthesized
  source 1..22: mol_type = other DNA
gaaaacaaaaacaaaaacaaaa

SEQ ID NO: 68101 - DNA, 22 bp, synthetic construct
  misc_feature 1..22: note = chemically synthesized
  source 1..22: mol_type = other DNA
tgctgccagatagtcagatgag

SEQ ID NO: 68102 - DNA, 22 bp, synthetic construct
  misc_feature 1..22: note = chemically synthesized
  source 1..22: mol_type = other DNA
ccagatagtcagatgagacctc

SEQ ID NO: 68103 - DNA, 22 bp, synthetic construct
  misc_feature 1..22: note = chemically synthesized
  source 1..22: mol_type = other DNA
actttgccacacggccagacac

SEQ ID NO: 68104 - DNA, 22 bp, synthetic construct
  misc_feature 1..22: note = chemically synthesized
  source 1..22: mol_type = other DNA
tgccacacggccagacactgta

SEQ ID NO: 68105 - DNA, 22 bp, synthetic construct
  misc_feature 1..22: note = chemically synthesized
  source 1..22: mol_type = other DNA
gccacacggccagacactgtag

SEQ ID NO: 68106 - DNA, 22 bp, synthetic construct
  misc_feature 1..22: note = chemically synthesized
  source 1..22: mol_type = other DNA
ccacacggccagacactgtaga

SEQ ID NO: 68107 - DNA, 22 bp, synthetic construct
  misc_feature 1..22: note = chemically synthesized
  source 1..22: mol_type = other DNA
tagagatctggtcctgccgtca

SEQ ID NO: 68108 - DNA, 22 bp, synthetic construct
  misc_feature 1..22: note = chemically synthesized
  source 1..22: mol_type = other DNA
gtcctgccgtcagcttgtttag

SEQ ID NO: 68109 - DNA, 22 bp, synthetic construct
  misc_feature 1..22: note = chemically synthesized
  source 1..22: mol_type = other DNA
ccgtcagcttgtttagggctaa

SEQ ID NO: 68110 - DNA, 22 bp, synthetic construct
  misc_feature 1..22: note = chemically synthesized
  source 1..22: mol_type = other DNA
gtttagggctaatgggtttgta

SEQ ID NO: 68111 - DNA, 22 bp, synthetic construct
  misc_feature 1..22: note = chemically synthesized
  source 1..22: mol_type = other DNA
tttagggctaatgggtttgtag

SEQ ID NO: 68112 - DNA, 22 bp, synthetic construct
  misc_feature 1..22: note = chemically synthesized
  source 1..22: mol_type = other DNA
agggctaatgggtttgtagaca

SEQ ID NO: 68113 - DNA, 22 bp, synthetic construct
  misc_feature 1..22: note = chemically synthesized
  source 1..22: mol_type = other DNA
gggctaatgggtttgtagacaa

SEQ ID NO: 68114 - DNA, 22 bp, synthetic construct
  misc_feature 1..22: note = chemically synthesized
  source 1..22: mol_type = other DNA
atgggtttgtagacaagtttgc

SEQ ID NO: 68115 - DNA, 22 bp, synthetic construct
  misc_feature 1..22: note = chemically synthesized
  source 1..22: mol_type = other DNA
gtagacaagtttgccaacaaga

SEQ ID NO: 68116 - DNA, 22 bp, synthetic construct
  misc_feature 1..22: note = chemically synthesized
  source 1..22: mol_type = other DNA
tagacaagtttgccaacaagag

SEQ ID NO: 68117 - DNA, 22 bp, synthetic construct
  misc_feature 1..22: note = chemically synthesized
  source 1..22: mol_type = other DNA
gccaacaagagattcatgcgag

SEQ ID NO: 68118 - DNA, 22 bp, synthetic construct
  misc_feature 1..22: note = chemically synthesized
  source 1..22: mol_type = other DNA
ccaacaagagattcatgcgagg

SEQ ID NO: 68119 - DNA, 22 bp, synthetic construct
  misc_feature 1..22: note = chemically synthesized
  source 1..22: mol_type = other DNA
atgcgaggggctaggcatggat

SEQ ID NO: 68120 - DNA, 22 bp, synthetic construct
  misc_feature 1..22: note = chemically synthesized
  source 1..22: mol_type = other DNA
ggcatggattaggttagcagtt

SEQ ID NO: 68121 - DNA, 22 bp, synthetic construct
  misc_feature 1..22: note = chemically synthesized
  source 1..22: mol_type = other DNA
ggttagcagttctcccatttct

SEQ ID NO: 68122 - DNA, 22 bp, synthetic construct
  misc_feature 1..22: note = chemically synthesized
  source 1..22: mol_type = other DNA
gcagttctcccatttcttgctg

SEQ ID NO: 68123 - DNA, 22 bp, synthetic construct
  misc_feature 1..22: note = chemically synthesized
  source 1..22: mol_type = other DNA
tcccatttcttgctggaggcct

SEQ ID NO: 68124 - DNA, 22 bp, synthetic construct
  misc_feature 1..22: note = chemically synthesized
  source 1..22: mol_type = other DNA
ccatttcttgctggaggcctgc

SEQ ID NO: 68125 - DNA, 22 bp, synthetic construct
  misc_feature 1..22: note = chemically synthesized
  source 1..22: mol_type = other DNA
cttgctggaggcctgctgaagc

SEQ ID NO: 68126 - DNA, 22 bp, synthetic construct
  misc_feature 1..22: note = chemically synthesized
  source 1..22: mol_type = other DNA
ttgctggaggcctgctgaagca

SEQ ID NO: 68127 - DNA, 22 bp, synthetic construct
  misc_feature 1..22: note = chemically synthesized
  source 1..22: mol_type = other DNA
gctggaggcctgctgaagcact

SEQ ID NO: 68128 - DNA, 22 bp, synthetic construct
  misc_feature 1..22: note = chemically synthesized
  source 1..22: mol_type = other DNA
ctggaggcctgctgaagcactt

SEQ ID NO: 68129 - DNA, 22 bp, synthetic construct
  misc_feature 1..22: note = chemically synthesized
  source 1..22: mol_type = other DNA
gaggcctgctgaagcacttcag

SEQ ID NO: 68130 - DNA, 22 bp, synthetic construct
  misc_feature 1..22: note = chemically synthesized
  source 1..22: mol_type = other DNA
ctgaagcacttcagggtctctt

SEQ ID NO: 68131 - DNA, 22 bp, synthetic construct
  misc_feature 1..22: note = chemically synthesized
  source 1..22: mol_type = other DNA
aagcacttcagggtctcttccc

SEQ ID NO: 68132 - DNA, 22 bp, synthetic construct
  misc_feature 1..22: note = chemically synthesized
  source 1..22: mol_type = other DNA
cagggtctcttcccagagtaag

SEQ ID NO: 68133 - DNA, 22 bp, synthetic construct
  misc_feature 1..22: note = chemically synthesized
  source 1..22: mol_type = other DNA
agggtctcttcccagagtaagt

SEQ ID NO: 68134 - DNA, 22 bp, synthetic construct
  misc_feature 1..22: note = chemically synthesized
  source 1..22: mol_type = other DNA
ttcccagagtaagtggcagaga

SEQ ID NO: 68135 - DNA, 22 bp, synthetic construct
  misc_feature 1..22: note = chemically synthesized
  source 1..22: mol_type = other DNA
cccagagtaagtggcagagaat

SEQ ID NO: 68136 - DNA, 22 bp, synthetic construct
  misc_feature 1..22: note = chemically synthesized
  source 1..22: mol_type = other DNA
ccagagtaagtggcagagaatt

SEQ ID NO: 68137 - DNA, 22 bp, synthetic construct
  misc_feature 1..22: note = chemically synthesized
  source 1..22: mol_type = other DNA
gaaatttgatactccccataca

SEQ ID NO: 68138 - DNA, 22 bp, synthetic construct
  misc_feature 1..22: note = chemically synthesized
  source 1..22: mol_type = other DNA
aaatttgatactccccatacaa

SEQ ID NO: 68139 - DNA, 22 bp, synthetic construct
  misc_feature 1..22: note = chemically synthesized
  source 1..22: mol_type = other DNA
gatactccccatacaaggatcc

SEQ ID NO: 68140 - DNA, 22 bp, synthetic construct
  misc_feature 1..22: note = chemically synthesized
  source 1..22: mol_type = other DNA
atactccccatacaaggatcca

SEQ ID NO: 68141 - DNA, 22 bp, synthetic construct
  misc_feature 1..22: note = chemically synthesized
  source 1..22: mol_type = other DNA
cccatacaaggatccaagtacc

SEQ ID NO: 68142 - DNA, 22 bp, synthetic construct
  misc_feature 1..22: note = chemically synthesized
  source 1..22: mol_type = other DNA
ttgcgtttatgctgggatcaca

SEQ ID NO: 68143 - DNA, 22 bp, synthetic construct
  misc_feature 1..22: note = chemically synthesized
  source 1..22: mol_type = other DNA
cgtttatgctgggatcacagag

SEQ ID NO: 68144 - DNA, 22 bp, synthetic construct
  misc_feature 1..22: note = chemically synthesized
  source 1..22: mol_type = other DNA
atgctgggatcacagagatacc

SEQ ID NO: 68145 - DNA, 22 bp, synthetic construct
  misc_feature 1..22: note = chemically synthesized
  source 1..22: mol_type = other DNA
tgctgggatcacagagatacct

SEQ ID NO: 68146 - DNA, 22 bp, synthetic construct
  misc_feature 1..22: note = chemically synthesized
  source 1..22: mol_type = other DNA
ggatcacagagatacctgggtt

SEQ ID NO: 68147 - DNA, 22 bp, synthetic construct
  misc_feature 1..22: note = chemically synthesized
  source 1..22: mol_type = other DNA
ggttgcctgtgtttcctaagaa

SEQ ID NO: 68148 - DNA, 22 bp, synthetic construct
  misc_feature 1..22: note = chemically synthesized
  source 1..22: mol_type = other DNA
cctgtgtttcctaagaaaagga

SEQ ID NO: 68149 - DNA, 22 bp, synthetic construct
  misc_feature 1..22: note = chemically synthesized
  source 1..22: mol_type = other DNA
tgtttcctaagaaaaggatgtc

SEQ ID NO: 68150 - DNA, 22 bp, synthetic construct
  misc_feature 1..22: note = chemically synthesized
  source 1..22: mol_type = other DNA
cctaagaaaaggatgtctgttt

SEQ ID NO: 68151 - DNA, 22 bp, synthetic construct
  misc_feature 1..22: note = chemically synthesized
  source 1..22: mol_type = other DNA
ctaagaaaaggatgtctgtttt

SEQ ID NO: 68152 - DNA, 22 bp, synthetic construct
  misc_feature 1..22: note = chemically synthesized
  source 1..22: mol_type = other DNA
agaaaaggatgtctgttttggc

SEQ ID NO: 68153 - DNA, 22 bp, synthetic construct
  misc_feature 1..22: note = chemically synthesized
  source 1..22: mol_type = other DNA
ttttggcagcaaacttagtgaa

SEQ ID NO: 68154 - DNA, 22 bp, synthetic construct
  misc_feature 1..22: note = chemically synthesized
  source 1..22: mol_type = other DNA
tggcagcaaacttagtgaacgg

SEQ ID NO: 68155 - DNA, 22 bp, synthetic construct
  misc_feature 1..22: note = chemically synthesized
  source 1..22: mol_type = other DNA
ggcagcaaacttagtgaacggc

SEQ ID NO: 68156 - DNA, 22 bp, synthetic construct
  misc_feature 1..22: note = chemically synthesized
  source 1..22: mol_type = other DNA
gcagcaaacttagtgaacggct

SEQ ID NO: 68157 - DNA, 22 bp, synthetic construct
  misc_feature 1..22: note = chemically synthesized
  source 1..22: mol_type = other DNA
agtgaacggctgaggcaaaaac

SEQ ID NO: 68158 - DNA, 22 bp, synthetic construct
  misc_feature 1..22: note = chemically synthesized
  source 1..22: mol_type = other DNA
gtgaacggctgaggcaaaaaca

SEQ ID NO: 68159 - DNA, 22 bp, synthetic construct
  misc_feature 1..22: note = chemically synthesized
  source 1..22: mol_type = other DNA
aggcaaaaacaagtgcaaagat

SEQ ID NO: 68160 - DNA, 22 bp, synthetic construct
  misc_feature 1..22: note = chemically synthesized
  source 1..22: mol_type = other DNA
tcagatttctcattgaaaaata

SEQ ID NO: 68161 - DNA, 22 bp, synthetic construct
  misc_feature 1..22: note = chemically synthesized
  source 1..22: mol_type = other DNA
agatttctcattgaaaaatacc

SEQ ID NO: 68162 - DNA, 22 bp, synthetic construct
  misc_feature 1..22: note = chemically synthesized
  source 1..22: mol_type = other DNA
ctcattgaaaaataccatgaca

SEQ ID NO: 68163 - DNA, 22 bp, synthetic construct
  misc_feature 1..22: note = chemically synthesized
  source 1..22: mol_type = other DNA
tcattgaaaaataccatgacaa

SEQ ID NO: 68164 - DNA, 22 bp, synthetic construct
  misc_feature 1..22: note = chemically synthesized
  source 1..22: mol_type = other DNA
attgaaaaataccatgacaaaa

SEQ ID NO: 68165 - DNA, 22 bp, synthetic construct
  misc_feature 1..22: note = chemically synthesized
  source 1..22: mol_type = other DNA
aaaaataccatgacaaaatctg

SEQ ID NO: 68166 - DNA, 22 bp, synthetic construct
  misc_feature 1..22: note = chemically synthesized
  source 1..22: mol_type = other DNA
tagtaattttacgccacactct

SEQ ID NO: 68167 - DNA, 22 bp, synthetic construct
  misc_feature 1..22: note = chemically synthesized
  source 1..22: mol_type = other DNA
tacgccacactctcaattcact

SEQ ID NO: 68168 - DNA, 22 bp, synthetic construct
  misc_feature 1..22: note = chemically synthesized
  source 1..22: mol_type = other DNA
acgccacactctcaattcactt

SEQ ID NO: 68169 - DNA, 22 bp, synthetic construct
  misc_feature 1..22: note = chemically synthesized
  source 1..22: mol_type = other DNA
cgccacactctcaattcacttg

SEQ ID NO: 68170 - DNA, 22 bp, synthetic construct
  misc_feature 1..22: note = chemically synthesized
  source 1..22: mol_type = other DNA
tcaattcacttgacgtaaacag

SEQ ID NO: 68171 - DNA, 22 bp, synthetic construct
  misc_feature 1..22: note = chemically synthesized
  source 1..22: mol_type = other DNA
aattcacttgacgtaaacagtc

SEQ ID NO: 68172 - DNA, 22 bp, synthetic construct
  misc_feature 1..22: note = chemically synthesized
  source 1..22: mol_type = other DNA
acttgacgtaaacagtcaaatg

SEQ ID NO: 68173 - DNA, 22 bp, synthetic construct
  misc_feature 1..22: note = chemically synthesized
  source 1..22: mol_type = other DNA
gacgtaaacagtcaaatgtaga

SEQ ID NO: 68174 - DNA, 22 bp, synthetic construct
  misc_feature 1..22: note = chemically synthesized
  source 1..22: mol_type = other DNA
acgtaaacagtcaaatgtagac

SEQ ID NO: 68175 - DNA, 22 bp, synthetic construct
  misc_feature 1..22: note = chemically synthesized
  source 1..22: mol_type = other DNA
gtttgttaagtccggtcttcct

SEQ ID NO: 68176 - DNA, 22 bp, synthetic construct
  misc_feature 1..22: note = chemically synthesized
  source 1..22: mol_type = other DNA
tttgttaagtccggtcttcctg

SEQ ID NO: 68177 - DNA, 22 bp, synthetic construct
  misc_feature 1..22: note = chemically synthesized
  source 1..22: mol_type = other DNA
gttaagtccggtcttcctgctt

SEQ ID NO: 68178 - DNA, 22 bp, synthetic construct
  misc_feature 1..22: note = chemically synthesized
  source 1..22: mol_type = other DNA
ttaagtccggtcttcctgcttg

SEQ ID NO: 68179 - DNA, 22 bp, synthetic construct
  misc_feature 1..22: note = chemically synthesized
  source 1..22: mol_type = other DNA
agtccggtcttcctgcttgtgt

SEQ ID NO: 68180 - DNA, 22 bp, synthetic construct
  misc_feature 1..22: note = chemically synthesized
  source 1..22: mol_type = other DNA
cctgcttgtgttggttcacttt

SEQ ID NO: 68181 - DNA, 22 bp, synthetic construct
  misc_feature 1..22: note = chemically synthesized
  source 1..22: mol_type = other DNA
ctgcttgtgttggttcactttg

SEQ ID NO: 68182 - DNA, 22 bp, synthetic construct
  misc_feature 1..22: note = chemically synthesized
  source 1..22: mol_type = other DNA
cttgtgttggttcactttgtgg

SEQ ID NO: 68183 - DNA, 22 bp, synthetic construct
  misc_feature 1..22: note = chemically synthesized
  source 1..22: mol_type = other DNA
gtgttggttcactttgtggtgt

SEQ ID NO: 68184 - DNA, 22 bp, synthetic construct
  misc_feature 1..22: note = chemically synthesized
  source 1..22: mol_type = other DNA
tgttggttcactttgtggtgtt

SEQ ID NO: 68185 - DNA, 22 bp, synthetic construct
  misc_feature 1..22: note = chemically synthesized
  source 1..22: mol_type = other DNA
gttcactttgtggtgtttattt

SEQ ID NO: 68186 - DNA, 22 bp, synthetic construct
  misc_feature 1..22: note = chemically synthesized
  source 1..22: mol_type = other DNA
actttgtggtgtttattttgtt

SEQ ID NO: 68187 - DNA, 22 bp, synthetic construct
  misc_feature 1..22: note = chemically synthesized
  source 1..22: mol_type = other DNA
tgtggtgtttattttgttttgg

SEQ ID NO: 68188 - DNA, 22 bp, synthetic construct
  misc_feature 1..22: note = chemically synthesized
  source 1..22: mol_type = other DNA
gtggtgtttattttgttttggg

SEQ ID NO: 68189 - DNA, 22 bp, synthetic construct
  misc_feature 1..22: note = chemically synthesized
  source 1..22: mol_type = other DNA
tggtgtttattttgttttgggt

SEQ ID NO: 68190 - DNA, 22 bp, synthetic construct
  misc_feature 1..22: note = chemically synthesized
  source 1..22: mol_type = other DNA
attttgttttgggtcagagagg

SEQ ID NO: 68191 - DNA, 22 bp, synthetic construct
  misc_feature 1..22: note = chemically synthesized
  source 1..22: mol_type = other DNA
ttttgttttgggtcagagagga

SEQ ID NO: 68192 - DNA, 22 bp, synthetic construct
  misc_feature 1..22: note = chemically synthesized
  source 1..22: mol_type = other DNA
tgttttgggtcagagaggatga

SEQ ID NO: 68193 - DNA, 22 bp, synthetic construct
  misc_feature 1..22: note = chemically synthesized
  source 1..22: mol_type = other DNA
gttttgggtcagagaggatgaa

SEQ ID NO: 68194 - DNA, 22 bp, synthetic construct
  misc_feature 1..22: note = chemically synthesized
  source 1..22: mol_type = other DNA
ttttgggtcagagaggatgaaa

SEQ ID NO: 68195 - DNA, 22 bp, synthetic construct
  misc_feature 1..22: note = chemically synthesized
  source 1..22: mol_type = other DNA
tgggtcagagaggatgaaatgt

SEQ ID NO: 68196 - DNA, 22 bp, synthetic construct
  misc_feature 1..22: note = chemically synthesized
  source 1..22: mol_type = other DNA
gggtcagagaggatgaaatgtc

SEQ ID NO: 68197 - DNA, 22 bp, synthetic construct
  misc_feature 1..22: note = chemically synthesized
  source 1..22: mol_type = other DNA
ggtcagagaggatgaaatgtct

SEQ ID NO: 68198 - DNA, 22 bp, synthetic construct
  misc_feature 1..22: note = chemically synthesized
  source 1..22: mol_type = other DNA
tgtagatgttctcaggctaggt

SEQ ID NO: 68199 - DNA, 22 bp, synthetic construct
  misc_feature 1..22: note = chemically synthesized
  source 1..22: mol_type = other DNA
tagatgttctcaggctaggtgg

SEQ ID NO: 68200 - DNA, 22 bp, synthetic construct
  misc_feature 1..22: note = chemically synthesized
  source 1..22: mol_type = other DNA
tcaggctaggtggtgcttccac

SEQ ID NO: 68201 - DNA, 22 bp, synthetic construct
  misc_feature 1..22: note = chemically synthesized
  source 1..22: mol_type = other DNA
aggctaggtggtgcttccacca

SEQ ID NO: 68202 - DNA, 22 bp, synthetic construct
  misc_feature 1..22: note = chemically synthesized
  source 1..22: mol_type = other DNA
ggtggtgcttccaccagggctt

SEQ ID NO: 68203 - DNA, 22 bp, synthetic construct
  misc_feature 1..22: note = chemically synthesized
  source 1..22: mol_type = other DNA
ccaccagggcttccctctgcag

SEQ ID NO: 68204 - DNA, 22 bp, synthetic construct
  misc_feature 1..22: note = chemically synthesized
  source 1..22: mol_type = other DNA
caccagggcttccctctgcagg

SEQ ID NO: 68205 - DNA, 22 bp, synthetic construct
  misc_feature 1..22: note = chemically synthesized
  source 1..22: mol_type = other DNA
ccctctgcaggcctggtaacag

SEQ ID NO: 68206 - DNA, 22 bp, synthetic construct
  misc_feature 1..22: note = chemically synthesized
  source 1..22: mol_type = other DNA
cctctgcaggcctggtaacagc

SEQ ID NO: 68207 - DNA, 22 bp, synthetic construct
  misc_feature 1..22: note = chemically synthesized
  source 1..22: mol_type = other DNA
tgcaggcctggtaacagcagac

SEQ ID NO: 68208 - DNA, 22 bp, synthetic construct
  misc_feature 1..22: note = chemically synthesized
  source 1..22: mol_type = other DNA
caggcctggtaacagcagacct

SEQ ID NO: 68209 - DNA, 22 bp, synthetic construct
  misc_feature 1..22: note = chemically synthesized
  source 1..22: mol_type = other DNA
gtaacagcagacctatgctgtc

SEQ ID NO: 68210 - DNA, 22 bp, synthetic construct
  misc_feature 1..22: note = chemically synthesized
  source 1..22: mol_type = other DNA
tgctgtctgtgtaagagccttc

SEQ ID NO: 68211 - DNA, 22 bp, synthetic construct
  misc_feature 1..22: note = chemically synthesized
  source 1..22: mol_type = other DNA
tctgtgtaagagccttctcagc

SEQ ID NO: 68212 - DNA, 22 bp, synthetic construct
  misc_feature 1..22: note = chemically synthesized
  source 1..22: mol_type = other DNA
tgtaagagccttctcagcagca

SEQ ID NO: 68213 - DNA, 22 bp, synthetic construct
  misc_feature 1..22: note = chemically synthesized
  source 1..22: mol_type = other DNA
ctcagcagcacaccatcgttac

SEQ ID NO: 68214 - DNA, 22 bp, synthetic construct
  misc_feature 1..22: note = chemically synthesized
  source 1..22: mol_type = other DNA
tcagcagcacaccatcgttacc

SEQ ID NO: 68215 - DNA, 22 bp, synthetic construct
  misc_feature 1..22: note = chemically synthesized
  source 1..22: mol_type = other DNA
agcagcacaccatcgttaccca

SEQ ID NO: 68216 - DNA, 22 bp, synthetic construct
  misc_feature 1..22: note = chemically synthesized
  source 1..22: mol_type = other DNA
cccaccaggctccttgcgaaag

SEQ ID NO: 68217 - DNA, 22 bp, synthetic construct
  misc_feature 1..22: note = chemically synthesized
  source 1..22: mol_type = other DNA
cttgcgaaaggaaatcttgtcc

SEQ ID NO: 68218 - DNA, 22 bp, synthetic construct
  misc_feature 1..22: note = chemically synthesized
  source 1..22: mol_type = other DNA
gcgaaaggaaatcttgtcccaa

SEQ ID NO: 68219 - DNA, 22 bp, synthetic construct
  misc_feature 1..22: note = chemically synthesized
  source 1..22: mol_type = other DNA
cgaaaggaaatcttgtcccaac

SEQ ID NO: 68220 - DNA, 22 bp, synthetic construct
  misc_feature 1..22: note = chemically synthesized
  source 1..22: mol_type = other DNA
gtcccaactgccttggctgtgc

SEQ ID NO: 68221 - DNA, 22 bp, synthetic construct
  misc_feature 1..22: note = chemically synthesized
  source 1..22: mol_type = other DNA
tcccaactgccttggctgtgct

SEQ ID NO: 68222 - DNA, 22 bp, synthetic construct
  misc_feature 1..22: note = chemically synthesized
  source 1..22: mol_type = other DNA
ccttggctgtgcttggcagtgt

SEQ ID NO: 68223 - DNA, 22 bp, synthetic construct
  misc_feature 1..22: note = chemically synthesized
  source 1..22: mol_type = other DNA
ggctgtgcttggcagtgtgctc

SEQ ID NO: 68224 - DNA, 22 bp, synthetic construct
  misc_feature 1..22: note = chemically synthesized
  source 1..22: mol_type = other DNA
gctgtgcttggcagtgtgctct

SEQ ID NO: 68225 - DNA, 22 bp, synthetic construct
  misc_feature 1..22: note = chemically synthesized
  source 1..22: mol_type = other DNA
tgcttggcagtgtgctctatat

SEQ ID NO: 68226 - DNA, 22 bp, synthetic construct
  misc_feature 1..22: note = chemically synthesized
  source 1..22: mol_type = other DNA
ggcagtgtgctctatataagga

SEQ ID NO: 68227 - DNA, 22 bp, synthetic construct
  misc_feature 1..22: note = chemically synthesized
  source 1..22: mol_type = other DNA
gcagtgtgctctatataaggag

SEQ ID NO: 68228 - DNA, 22 bp, synthetic construct
  misc_feature 1..22: note = chemically synthesized
  source 1..22: mol_type = other DNA
tatataaggagaacaggatgta

SEQ ID NO: 68229 - DNA, 22 bp, synthetic construct
  misc_feature 1..22: note = chemically synthesized
  source 1..22: mol_type = other DNA
tataaggagaacaggatgtatt

SEQ ID NO: 68230 - DNA, 22 bp, synthetic construct
  misc_feature 1..22: note = chemically synthesized
  source 1..22: mol_type = other DNA
tacacttgagacctgctatcct

SEQ ID NO: 68231 - DNA, 22 bp, synthetic construct
  misc_feature 1..22: note = chemically synthesized
  source 1..22: mol_type = other DNA
acacttgagacctgctatccta

SEQ ID NO: 68232 - DNA, 22 bp, synthetic construct
  misc_feature 1..22: note = chemically synthesized
  source 1..22: mol_type = other DNA
cacttgagacctgctatcctag

SEQ ID NO: 68233 - DNA, 22 bp, synthetic construct
  misc_feature 1..22: note = chemically synthesized
  source 1..22: mol_type = other DNA
gagacctgctatcctagagtac

SEQ ID NO: 68234 - DNA, 22 bp, synthetic construct
  misc_feature 1..22: note = chemically synthesized
  source 1..22: mol_type = other DNA
agacctgctatcctagagtaca

SEQ ID NO: 68235 - DNA, 22 bp, synthetic construct
  misc_feature 1..22: note = chemically synthesized
  source 1..22: mol_type = other DNA
ctatcctagagtacaacaacaa

SEQ ID NO: 68236 - DNA, 22 bp, synthetic construct
  misc_feature 1..22: note = chemically synthesized
  source 1..22: mol_type = other DNA
tcctagagtacaacaacaacac

SEQ ID NO: 68237 - DNA, 22 bp, synthetic construct
  misc_feature 1..22: note = chemically synthesized
  source 1..22: mol_type = other DNA
gagtacaacaacaacacttcta

SEQ ID NO: 68238 - DNA, 22 bp, synthetic construct
  misc_feature 1..22: note = chemically synthesized
  source 1..22: mol_type = other DNA
ctaagtgctcttaatattaagc

SEQ ID NO: 68239 - DNA, 22 bp, synthetic construct
  misc_feature 1..22: note = chemically synthesized
  source 1..22: mol_type = other DNA
taagtgctcttaatattaagct

SEQ ID NO: 68240 - DNA, 22 bp, synthetic construct
  misc_feature 1..22: note = chemically synthesized
  source 1..22: mol_type = other DNA
agtgctcttaatattaagctaa

SEQ ID NO: 68241 - DNA, 22 bp, synthetic construct
  misc_feature 1..22: note = chemically synthesized
  source 1..22: mol_type = other DNA
ttaatattaagctaatggaaaa

SEQ ID NO: 68242 - DNA, 22 bp, synthetic construct
  misc_feature 1..22: note = chemically synthesized
  source 1..22: mol_type = other DNA
aatattaagctaatggaaaaca

SEQ ID NO: 68243 - DNA, 22 bp, synthetic construct
  misc_feature 1..22: note = chemically synthesized
  source 1..22: mol_type = other DNA
atattaagctaatggaaaacat

SEQ ID NO: 68244 - DNA, 22 bp, synthetic construct
  misc_feature 1..22: note = chemically synthesized
  source 1..22: mol_type = other DNA
agctaatggaaaacatactgtt

SEQ ID NO: 68245 - DNA, 22 bp, synthetic construct
  misc_feature 1..22: note = chemically synthesized
  source 1..22: mol_type = other DNA
atggaaaacatactgtttgttc

SEQ ID NO: 68246 - DNA, 22 bp, synthetic construct
  misc_feature 1..22: note = chemically synthesized
  source 1..22: mol_type = other DNA
tttgttcaccatcaaagtctgt

SEQ ID NO: 68247 - DNA, 22 bp, synthetic construct
  misc_feature 1..22: note = chemically synthesized
  source 1..22: mol_type = other DNA
gttcaccatcaaagtctgtttt

SEQ ID NO: 68248 - DNA, 22 bp, synthetic construct
  misc_feature 1..22: note = chemically synthesized
  source 1..22: mol_type = other DNA
ttcaccatcaaagtctgttttt

SEQ ID NO: 68249 - DNA, 22 bp, synthetic construct
  misc_feature 1..22: note = chemically synthesized
  source 1..22: mol_type = other DNA
accatcaaagtctgtttttctt

SEQ ID NO: 68250 - DNA, 22 bp, synthetic construct
  misc_feature 1..22: note = chemically synthesized
  source 1..22: mol_type = other DNA
tttttcttgtctcccgccctcc

SEQ ID NO: 68251 - DNA, 22 bp, synthetic construct
  misc_feature 1..22: note = chemically synthesized
  source 1..22: mol_type = other DNA
ttcttgtctcccgccctcccca

SEQ ID NO: 68252 - DNA, 22 bp, synthetic construct
  misc_feature 1..22: note = chemically synthesized
  source 1..22: mol_type = other DNA
tcttgtctcccgccctccccaa

SEQ ID NO: 68253 - DNA, 22 bp, synthetic construct
  misc_feature 1..22: note = chemically synthesized
  source 1..22: mol_type = other DNA
cttgtctcccgccctccccaat

SEQ ID NO: 68254 - DNA, 22 bp, synthetic construct
  misc_feature 1..22: note = chemically synthesized
  source 1..22: mol_type = other DNA
ttgtctcccgccctccccaatc

SEQ ID NO: 68255 - DNA, 22 bp, synthetic construct
  misc_feature 1..22: note = chemically synthesized
  source 1..22: mol_type = other DNA
gtctcccgccctccccaatcat

SEQ ID NO: 68256 - DNA, 22 bp, synthetic construct
  misc_feature 1..22: note = chemically synthesized
  source 1..22: mol_type = other DNA
tctcccgccctccccaatcatc

SEQ ID NO: 68257 - DNA, 22 bp, synthetic construct
  misc_feature 1..22: note = chemically synthesized
  source 1..22: mol_type = other DNA
ccgccctccccaatcatcatga

SEQ ID NO: 68258 - DNA, 22 bp, synthetic construct
  misc_feature 1..22: note = chemically synthesized
  source 1..22: mol_type = other DNA
cccaatcatcatgaactccaaa

SEQ ID NO: 68259 - DNA, 22 bp, synthetic construct
  misc_feature 1..22: note = chemically synthesized
  source 1..22: mol_type = other DNA
caaacctctagaacacacagag

SEQ ID NO: 68260 - DNA, 22 bp, synthetic construct
  misc_feature 1..22: note = chemically synthesized
  source 1..22: mol_type = other DNA
tagaacacacagagcgtctcct

SEQ ID NO: 68261 - DNA, 22 bp, synthetic construct
  misc_feature 1..22: note = chemically synthesized
  source 1..22: mol_type = other DNA
gaacacacagagcgtctcctgc

SEQ ID NO: 68262 - DNA, 22 bp, synthetic construct
  misc_feature 1..22: note = chemically synthesized
  source 1..22: mol_type = other DNA
ctgcaccatctatcctccagtc

SEQ ID NO: 68263 - DNA, 22 bp, synthetic construct
  misc_feature 1..22: note = chemically synthesized
  source 1..22: mol_type = other DNA
caccatctatcctccagtctgt

SEQ ID NO: 68264 - DNA, 22 bp, synthetic construct
  misc_feature 1..22: note = chemically synthesized
  source 1..22: mol_type = other DNA
tcctccagtctgtctcaagatg

SEQ ID NO: 68265 - DNA, 22 bp, synthetic construct
  misc_feature 1..22: note = chemically synthesized
  source 1..22: mol_type = other DNA
cagtctgtctcaagatggacag

SEQ ID NO: 68266 - DNA, 22 bp, synthetic construct
  misc_feature 1..22: note = chemically synthesized
  source 1..22: mol_type = other DNA
tctcaagatggacagctacatg

SEQ ID NO: 68267 - DNA, 22 bp, synthetic construct
  misc_feature 1..22: note = chemically synthesized
  source 1..22: mol_type = other DNA
aagatggacagctacatggtta

SEQ ID NO: 68268 - DNA, 22 bp, synthetic construct
  misc_feature 1..22: note = chemically synthesized
  source 1..22: mol_type = other DNA
catggttagttagctagaggag

SEQ ID NO: 68269 - DNA, 22 bp, synthetic construct
  misc_feature 1..22: note = chemically synthesized
  source 1..22: mol_type = other DNA
gttagctagaggaggacttgga

SEQ ID NO: 68270 - DNA, 22 bp, synthetic construct
  misc_feature 1..22: note = chemically synthesized
  source 1..22: mol_type = other DNA
gctagaggaggacttggaaaag

SEQ ID NO: 68271 - DNA, 22 bp, synthetic construct
  misc_feature 1..22: note = chemically synthesized
  source 1..22: mol_type = other DNA
gaggaggacttggaaaagctag

SEQ ID NO: 68272 - DNA, 22 bp, synthetic construct
  misc_feature 1..22: note = chemically synthesized
  source 1..22: mol_type = other DNA
ggaaaagctaggcacttaccac

SEQ ID NO: 68273 - DNA, 22 bp, synthetic construct
  misc_feature 1..22: note = chemically synthesized
  source 1..22: mol_type = other DNA
gaaaagctaggcacttaccaca

SEQ ID NO: 68274 - DNA, 22 bp, synthetic construct
  misc_feature 1..22: note = chemically synthesized
  source 1..22: mol_type = other DNA
ggcacttaccacataaaccgta

SEQ ID NO: 68275 - DNA, 22 bp, synthetic construct
  misc_feature 1..22: note = chemically synthesized
  source 1..22: mol_type = other DNA
accacataaaccgtaaaatccc

SEQ ID NO: 68276 - DNA, 22 bp, synthetic construct
  misc_feature 1..22: note = chemically synthesized
  source 1..22: mol_type = other DNA
ccacataaaccgtaaaatcccc

SEQ ID NO: 68277 - DNA, 22 bp, synthetic construct
  misc_feature 1..22: note = chemically synthesized
  source 1..22: mol_type = other DNA
cacaaaccaaattttcctcttc

SEQ ID NO: 68278 - DNA, 22 bp, synthetic construct
  misc_feature 1..22: note = chemically synthesized
  source 1..22: mol_type = other DNA
tcctcttctcaaaaaaatctca

SEQ ID NO: 68279 - DNA, 22 bp, synthetic construct
  misc_feature 1..22: note = chemically synthesized
  source 1..22: mol_type = other DNA
cctcttctcaaaaaaatctcag

SEQ ID NO: 68280 - DNA, 22 bp, synthetic construct
  misc_feature 1..22: note = chemically synthesized
  source 1..22: mol_type = other DNA
ctcttctcaaaaaaatctcagt

SEQ ID NO: 68281 - DNA, 22 bp, synthetic construct
  misc_feature 1..22: note = chemically synthesized
  source 1..22: mol_type = other DNA
ttctcaaaaaaatctcagtgct

SEQ ID NO: 68282 - DNA, 22 bp, synthetic construct
  misc_feature 1..22: note = chemically synthesized
  source 1..22: mol_type = other DNA
ctcaaaaaaatctcagtgctac

SEQ ID NO: 68283 - DNA, 22 bp, synthetic construct
  misc_feature 1..22: note = chemically synthesized
  source 1..22: mol_type = other DNA
tcaaaaaaatctcagtgctaca

SEQ ID NO: 68284 - DNA, 22 bp, synthetic construct
  misc_feature 1..22: note = chemically synthesized
  source 1..22: mol_type = other DNA
aaaaaaatctcagtgctacaaa

SEQ ID NO: 68285 - DNA, 22 bp, synthetic construct
  misc_feature 1..22: note = chemically synthesized
  source 1..22: mol_type = other DNA
agtgctacaaatgtttcattga

SEQ ID NO: 68286 - DNA, 22 bp, synthetic construct
  misc_feature 1..22: note = chemically synthesized
  source 1..22: mol_type = other DNA
caaatgtttcattgactattag

SEQ ID NO: 68287 - DNA, 22 bp, synthetic construct
  misc_feature 1..22: note = chemically synthesized
  source 1..22: mol_type = other DNA
cattgactattagattcatttt

SEQ ID NO: 68288 - DNA, 22 bp, synthetic construct
  misc_feature 1..22: note = chemically synthesized
  source 1..22: mol_type = other DNA
attgactattagattcatttta

SEQ ID NO: 68289 - DNA, 22 bp, synthetic construct
  misc_feature 1..22: note = chemically synthesized
  source 1..22: mol_type = other DNA
actattagattcattttattag

SEQ ID NO: 68290 - DNA, 22 bp, synthetic construct
  misc_feature 1..22: note = chemically synthesized
  source 1..22: mol_type = other DNA
ttagattcattttattagtgtg

SEQ ID NO: 68291 - DNA, 22 bp, synthetic construct
  misc_feature 1..22: note = chemically synthesized
  source 1..22: mol_type = other DNA
gattcattttattagtgtgaga

SEQ ID NO: 68292 - DNA, 22 bp, synthetic construct
  misc_feature 1..22: note = chemically synthesized
  source 1..22: mol_type = other DNA
attttattagtgtgagaagtca

SEQ ID NO: 68293 - DNA, 22 bp, synthetic construct
  misc_feature 1..22: note = chemically synthesized
  source 1..22: mol_type = other DNA
tattagtgtgagaagtcacttg

SEQ ID NO: 68294 - DNA, 22 bp, synthetic construct
  misc_feature 1..22: note = chemically synthesized
  source 1..22: mol_type = other DNA
attagtgtgagaagtcacttgt

SEQ ID NO: 68295 - DNA, 22 bp, synthetic construct
  misc_feature 1..22: note = chemically synthesized
  source 1..22: mol_type = other DNA
ttagtgtgagaagtcacttgtc

SEQ ID NO: 68296 - DNA, 22 bp, synthetic construct
  misc_feature 1..22: note = chemically synthesized
  source 1..22: mol_type = other DNA
gtgtgagaagtcacttgtcttc

SEQ ID NO: 68297 - DNA, 22 bp, synthetic construct
  misc_feature 1..22: note = chemically synthesized
  source 1..22: mol_type = other DNA
gtcttcaccagagtacaacaaa

SEQ ID NO: 68298 - DNA, 22 bp, synthetic construct
  misc_feature 1..22: note = chemically synthesized
  source 1..22: mol_type = other DNA
tcttcaccagagtacaacaaag

SEQ ID NO: 68299 - DNA, 22 bp, synthetic construct
  misc_feature 1..22: note = chemically synthesized
  source 1..22: mol_type = other DNA
caccagagtacaacaaagtgca

SEQ ID NO: 68300 - DNA, 22 bp, synthetic construct
  misc_feature 1..22: note = chemically synthesized
  source 1..22: mol_type = other DNA
accagagtacaacaaagtgcag

SEQ ID NO: 68301 - DNA, 22 bp, synthetic construct
  misc_feature 1..22: note = chemically synthesized
  source 1..22: mol_type = other DNA
ctgggtgctggcattattggaa

SEQ ID NO: 68302 - DNA, 22 bp, synthetic construct
  misc_feature 1..22: note = chemically synthesized
  source 1..22: mol_type = other DNA
tgggtgctggcattattggaat

SEQ ID NO: 68303 - DNA, 22 bp, synthetic construct
  misc_feature 1..22: note = chemically synthesized
  source 1..22: mol_type = other DNA
ggtgctggcattattggaatgc

SEQ ID NO: 68304 - DNA, 22 bp, synthetic construct
  misc_feature 1..22: note = chemically synthesized
  source 1..22: mol_type = other DNA
gcattattggaatgctggttct

SEQ ID NO: 68305 - DNA, 22 bp, synthetic construct
  misc_feature 1..22: note = chemically synthesized
  source 1..22: mol_type = other DNA
ttggaatgctggttctttcctt

SEQ ID NO: 68306 - DNA, 22 bp, synthetic construct
  misc_feature 1..22: note = chemically synthesized
  source 1..22: mol_type = other DNA
gaatgctggttctttccttgtc

SEQ ID NO: 68307 - DNA, 22 bp, synthetic construct
  misc_feature 1..22: note = chemically synthesized
  source 1..22: mol_type = other DNA
gttctttccttgtcatttaatg

SEQ ID NO: 68308 - DNA, 22 bp, synthetic construct
  misc_feature 1..22: note = chemically synthesized
  source 1..22: mol_type = other DNA
tttccttgtcatttaatggtca

SEQ ID NO: 68309 - DNA, 22 bp, synthetic construct
  misc_feature 1..22: note = chemically synthesized
  source 1..22: mol_type = other DNA
tccttgtcatttaatggtcaaa

SEQ ID NO: 68310 - DNA, 22 bp, synthetic construct
  misc_feature 1..22: note = chemically synthesized
  source 1..22: mol_type = other DNA
ccttgtcatttaatggtcaaag

SEQ ID NO: 68311 - DNA, 22 bp, synthetic construct
  misc_feature 1..22: note = chemically synthesized
  source 1..22: mol_type = other DNA
cttgtcatttaatggtcaaagt

SEQ ID NO: 68312 - DNA, 22 bp, synthetic construct
  misc_feature 1..22: note = chemically synthesized
  source 1..22: mol_type = other DNA
gtcatttaatggtcaaagttat

SEQ ID NO: 68313 - DNA, 22 bp, synthetic construct
  misc_feature 1..22: note = chemically synthesized
  source 1..22: mol_type = other DNA
tcatttaatggtcaaagttatt

SEQ ID NO: 68314 - DNA, 22 bp, synthetic construct
  misc_feature 1..22: note = chemically synthesized
  source 1..22: mol_type = other DNA
aatggtcaaagttatttggacc

SEQ ID NO: 68315 - DNA, 22 bp, synthetic construct
  misc_feature 1..22: note = chemically synthesized
  source 1..22: mol_type = other DNA
atggtcaaagttatttggaccc

SEQ ID NO: 68316 - DNA, 22 bp, synthetic construct
  misc_feature 1..22: note = chemically synthesized
  source 1..22: mol_type = other DNA
tttggaccccagaagtctaatc

SEQ ID NO: 68317 - DNA, 22 bp, synthetic construct
  misc_feature 1..22: note = chemically synthesized
  source 1..22: mol_type = other DNA
ggaccccagaagtctaatcttt

SEQ ID NO: 68318 - DNA, 22 bp, synthetic construct
  misc_feature 1..22: note = chemically synthesized
  source 1..22: mol_type = other DNA
gaccccagaagtctaatcttta

SEQ ID NO: 68319 - DNA, 22 bp, synthetic construct
  misc_feature 1..22: note = chemically synthesized
  source 1..22: mol_type = other DNA
atctttatcttccattgctttg

SEQ ID NO: 68320 - DNA, 22 bp, synthetic construct
  misc_feature 1..22: note = chemically synthesized
  source 1..22: mol_type = other DNA
tatcttccattgctttgtattg

SEQ ID NO: 68321 - DNA, 22 bp, synthetic construct
  misc_feature 1..22: note = chemically synthesized
  source 1..22: mol_type = other DNA
atcttccattgctttgtattgt

SEQ ID NO: 68322 - DNA, 22 bp, synthetic construct
  misc_feature 1..22: note = chemically synthesized
  source 1..22: mol_type = other DNA
tcttccattgctttgtattgtg

SEQ ID NO: 68323 - DNA, 22 bp, synthetic construct
  misc_feature 1..22: note = chemically synthesized
  source 1..22: mol_type = other DNA
ccattgctttgtattgtgagaa

SEQ ID NO: 68324 - DNA, 22 bp, synthetic construct
  misc_feature 1..22: note = chemically synthesized
  source 1..22: mol_type = other DNA
cattgctttgtattgtgagaag

SEQ ID NO: 68325 - DNA, 22 bp, synthetic construct
  misc_feature 1..22: note = chemically synthesized
  source 1..22: mol_type = other DNA
ctttgtattgtgagaagccaca

SEQ ID NO: 68326 - DNA, 22 bp, synthetic construct
  misc_feature 1..22: note = chemically synthesized
  source 1..22: mol_type = other DNA
tgtattgtgagaagccacatct

SEQ ID NO: 68327 - DNA, 22 bp, synthetic construct
  misc_feature 1..22: note = chemically synthesized
  source 1..22: mol_type = other DNA
gtattgtgagaagccacatctg

SEQ ID NO: 68328 - DNA, 22 bp, synthetic construct
  misc_feature 1..22: note = chemically synthesized
  source 1..22: mol_type = other DNA
tattgtgagaagccacatctgt

SEQ ID NO: 68329 - DNA, 22 bp, synthetic construct
  misc_feature 1..22: note = chemically synthesized
  source 1..22: mol_type = other DNA
tgagaagccacatctgtgtaag

SEQ ID NO: 68330 - DNA, 22 bp, synthetic construct
  misc_feature 1..22: note = chemically synthesized
  source 1..22: mol_type = other DNA
tgtaaggtttccagttgacagg

SEQ ID NO: 68331 - DNA, 22 bp, synthetic construct
  misc_feature 1..22: note = chemically synthesized
  source 1..22: mol_type = other DNA
ccagttgacaggattctagagt

SEQ ID NO: 68332 - DNA, 22 bp, synthetic construct
  misc_feature 1..22: note = chemically synthesized
  source 1..22: mol_type = other DNA
cagttgacaggattctagagta

SEQ ID NO: 68333 - DNA, 22 bp, synthetic construct
  misc_feature 1..22: note = chemically synthesized
  source 1..22: mol_type = other DNA
acaggattctagagtatggccc

SEQ ID NO: 68334 - DNA, 22 bp, synthetic construct
  misc_feature 1..22: note = chemically synthesized
  source 1..22: mol_type = other DNA
tagagtatggcccagctcagtc

SEQ ID NO: 68335 - DNA, 22 bp, synthetic construct
  misc_feature 1..22: note = chemically synthesized
  source 1..22: mol_type = other DNA
gagtatggcccagctcagtcca

SEQ ID NO: 68336 - DNA, 22 bp, synthetic construct
  misc_feature 1..22: note = chemically synthesized
  source 1..22: mol_type = other DNA
agtccagaaatgcccaggtttc

SEQ ID NO: 68337 - DNA, 22 bp, synthetic construct
  misc_feature 1..22: note = chemically synthesized
  source 1..22: mol_type = other DNA
cccctatcactgaaggcgctat

SEQ ID NO: 68338 - DNA, 22 bp, synthetic construct
  misc_feature 1..22: note = chemically synthesized
  source 1..22: mol_type = other DNA
ccctatcactgaaggcgctatc

SEQ ID NO: 68339 - DNA, 22 bp, synthetic construct
  misc_feature 1..22: note = chemically synthesized
  source 1..22: mol_type = other DNA
tcactgaaggcgctatcataaa

SEQ ID NO: 68340 - DNA, 22 bp, synthetic construct
  misc_feature 1..22: note = chemically synthesized
  source 1..22: mol_type = other DNA
aaggcgctatcataaatatagc

SEQ ID NO: 68341 - DNA, 22 bp, synthetic construct
  misc_feature 1..22: note = chemically synthesized
  source 1..22: mol_type = other DNA
tcataaatatagcatgggaaga

SEQ ID NO: 68342 - DNA, 22 bp, synthetic construct
  misc_feature 1..22: note = chemically synthesized
  source 1..22: mol_type = other DNA
tgtcccataaaaaacgattcac

SEQ ID NO: 68343 - DNA, 22 bp, synthetic construct
  misc_feature 1..22: note = chemically synthesized
  source 1..22: mol_type = other DNA
tcccataaaaaacgattcacaa

SEQ ID NO: 68344 - DNA, 22 bp, synthetic construct
  misc_feature 1..22: note = chemically synthesized
  source 1..22: mol_type = other DNA
acaaatctactcatttcctatc

SEQ ID NO: 68345 - DNA, 22 bp, synthetic construct
  misc_feature 1..22: note = chemically synthesized
  source 1..22: mol_type = other DNA
ctcatttcctatcagcattttg

SEQ ID NO: 68346 - DNA, 22 bp, synthetic construct
  misc_feature 1..22: note = chemically synthesized
  source 1..22: mol_type = other DNA
atttcctatcagcattttgctt

SEQ ID NO: 68347 - DNA, 22 bp, synthetic construct
  misc_feature 1..22: note = chemically synthesized
  source 1..22: mol_type = other DNA
cctatcagcattttgctttttg

SEQ ID NO: 68348 - DNA, 22 bp, synthetic construct
  misc_feature 1..22: note = chemically synthesized
  source 1..22: mol_type = other DNA
ctatcagcattttgctttttgc

SEQ ID NO: 68349 - DNA, 22 bp, synthetic construct
  misc_feature 1..22: note = chemically synthesized
  source 1..22: mol_type = other DNA
tcagcattttgctttttgcttg

SEQ ID NO: 68350 - DNA, 22 bp, synthetic construct
  misc_feature 1..22: note = chemically synthesized
  source 1..22: mol_type = other DNA
tgctttttgcttgggtttgtct

SEQ ID NO: 68351 - DNA, 22 bp, synthetic construct
  misc_feature 1..22: note = chemically synthesized
  source 1..22: mol_type = other DNA
gctttttgcttgggtttgtcta

SEQ ID NO: 68352 - DNA, 22 bp, synthetic construct
  misc_feature 1..22: note = chemically synthesized
  source 1..22: mol_type = other DNA
ctttttgcttgggtttgtctat

SEQ ID NO: 68353 - DNA, 22 bp, synthetic construct
  misc_feature 1..22: note = chemically synthesized
  source 1..22: mol_type = other DNA
tttgcttgggtttgtctataaa

SEQ ID NO: 68354 - DNA, 22 bp, synthetic construct
  misc_feature 1..22: note = chemically synthesized
  source 1..22: mol_type = other DNA
ttgcttgggtttgtctataaag

SEQ ID NO: 68355 - DNA, 22 bp, synthetic construct
  misc_feature 1..22: note = chemically synthesized
  source 1..22: mol_type = other DNA
tgcttgggtttgtctataaagt

SEQ ID NO: 68356 - DNA, 22 bp, synthetic construct
  misc_feature 1..22: note = chemically synthesized
  source 1..22: mol_type = other DNA
gcttgggtttgtctataaagta

SEQ ID NO: 68357 - DNA, 22 bp, synthetic construct
  misc_feature 1..22: note = chemically synthesized
  source 1..22: mol_type = other DNA
cttgggtttgtctataaagtaa

SEQ ID NO: 68358 - DNA, 22 bp, synthetic construct
  misc_feature 1..22: note = chemically synthesized
  source 1..22: mol_type = other DNA
gggtttgtctataaagtaaagt

SEQ ID NO: 68359 - DNA, 22 bp, synthetic construct
  misc_feature 1..22: note = chemically synthesized
  source 1..22: mol_type = other DNA
ggtttgtctataaagtaaagtt

SEQ ID NO: 68360 - DNA, 22 bp, synthetic construct
  misc_feature 1..22: note = chemically synthesized
  source 1..22: mol_type = other DNA
gtctataaagtaaagttaatgt

SEQ ID NO: 68361 - DNA, 22 bp, synthetic construct
  misc_feature 1..22: note = chemically synthesized
  source 1..22: mol_type = other DNA
tctataaagtaaagttaatgta

SEQ ID NO: 68362 - DNA, 22 bp, synthetic construct
  misc_feature 1..22: note = chemically synthesized
  source 1..22: mol_type = other DNA
taaagtaaagttaatgtatgca

SEQ ID NO: 68363 - DNA, 22 bp, synthetic construct
  misc_feature 1..22: note = chemically synthesized
  source 1..22: mol_type = other DNA
atgtatgcatgtaaaccagcct

SEQ ID NO: 68364 - DNA, 22 bp, synthetic construct
  misc_feature 1..22: note = chemically synthesized
  source 1..22: mol_type = other DNA
gcagataaaatccccccatgtt

SEQ ID NO: 68365 - DNA, 22 bp, synthetic construct
  misc_feature 1..22: note = chemically synthesized
  source 1..22: mol_type = other DNA
cagataaaatccccccatgttt

SEQ ID NO: 68366 - DNA, 22 bp, synthetic construct
  misc_feature 1..22: note = chemically synthesized
  source 1..22: mol_type = other DNA
ccaggctacccacaatattacc

SEQ ID NO: 68367 - DNA, 22 bp, synthetic construct
  misc_feature 1..22: note = chemically synthesized
  source 1..22: mol_type = other DNA
caggctacccacaatattacca

SEQ ID NO: 68368 - DNA, 22 bp, synthetic construct
  misc_feature 1..22: note = chemically synthesized
  source 1..22: mol_type = other DNA
cccacaatattaccagttttcc

SEQ ID NO: 68369 - DNA, 22 bp, synthetic construct
  misc_feature 1..22: note = chemically synthesized
  source 1..22: mol_type = other DNA
ccagttttccccttgctgctta

SEQ ID NO: 68370 - DNA, 22 bp, synthetic construct
  misc_feature 1..22: note = chemically synthesized
  source 1..22: mol_type = other DNA
tccccttgctgcttacacatct

SEQ ID NO: 68371 - DNA, 22 bp, synthetic construct
  misc_feature 1..22: note = chemically synthesized
  source 1..22: mol_type = other DNA
ccccttgctgcttacacatctt

SEQ ID NO: 68372 - DNA, 22 bp, synthetic construct
  misc_feature 1..22: note = chemically synthesized
  source 1..22: mol_type = other DNA
cccttgctgcttacacatcttc

SEQ ID NO: 68373 - DNA, 22 bp, synthetic construct
  misc_feature 1..22: note = chemically synthesized
  source 1..22: mol_type = other DNA
gctgcttacacatcttctttcc

SEQ ID NO: 68374 - DNA, 22 bp, synthetic construct
  misc_feature 1..22: note = chemically synthesized
  source 1..22: mol_type = other DNA
ctgcttacacatcttctttcca

SEQ ID NO: 68375 - DNA, 22 bp, synthetic construct
  misc_feature 1..22: note = chemically synthesized
  source 1..22: mol_type = other DNA
cttacacatcttctttccacaa

SEQ ID NO: 68376 - DNA, 22 bp, synthetic construct
  misc_feature 1..22: note = chemically synthesized
  source 1..22: mol_type = other DNA
acacatcttctttccacaagac

SEQ ID NO: 68377 - DNA, 22 bp, synthetic construct
  misc_feature 1..22: note = chemically synthesized
  source 1..22: mol_type = other DNA
cacatcttctttccacaagaca

SEQ ID NO: 68378 - DNA, 22 bp, synthetic construct
  misc_feature 1..22: note = chemically synthesized
  source 1..22: mol_type = other DNA
ctttccacaagacaataatcaa

SEQ ID NO: 68379 - DNA, 22 bp, synthetic construct
  misc_feature 1..22: note = chemically synthesized
  source 1..22: mol_type = other DNA
tttccacaagacaataatcaaa

SEQ ID NO: 68380 - DNA, 22 bp, synthetic construct
  misc_feature 1..22: note = chemically synthesized
  source 1..22: mol_type = other DNA
tccacaagacaataatcaaaca

SEQ ID NO: 68381 - DNA, 22 bp, synthetic construct
  misc_feature 1..22: note = chemically synthesized
  source 1..22: mol_type = other DNA
ccacaagacaataatcaaacaa

SEQ ID NO: 68382 - DNA, 22 bp, synthetic construct
  misc_feature 1..22: note = chemically synthesized
  source 1..22: mol_type = other DNA
cacaagacaataatcaaacaac

SEQ ID NO: 68383 - DNA, 22 bp, synthetic construct
  misc_feature 1..22: note = chemically synthesized
  source 1..22: mol_type = other DNA
tcccctttcctaaaacaaaccc

SEQ ID NO: 68384 - DNA, 22 bp, synthetic construct
  misc_feature 1..22: note = chemically synthesized
  source 1..22: mol_type = other DNA
ccctttcctaaaacaaaccctt

SEQ ID NO: 68385 - DNA, 22 bp, synthetic construct
  misc_feature 1..22: note = chemically synthesized
  source 1..22: mol_type = other DNA
tcctaaaacaaaccctttcact

SEQ ID NO: 68386 - DNA, 22 bp, synthetic construct
  misc_feature 1..22: note = chemically synthesized
  source 1..22: mol_type = other DNA
cctaaaacaaaccctttcactt

SEQ ID NO: 68387 - DNA, 22 bp, synthetic construct
  misc_feature 1..22: note = chemically synthesized
  source 1..22: mol_type = other DNA
ctaaaacaaaccctttcacttt

SEQ ID NO: 68388 - DNA, 22 bp, synthetic construct
  misc_feature 1..22: note = chemically synthesized
  source 1..22: mol_type = other DNA
aaacaaaccctttcacttttgt

SEQ ID NO: 68389 - DNA, 22 bp, synthetic construct
  misc_feature 1..22: note = chemically synthesized
  source 1..22: mol_type = other DNA
tcacttttgtcaaaaagaccga

SEQ ID NO: 68390 - DNA, 22 bp, synthetic construct
  misc_feature 1..22: note = chemically synthesized
  source 1..22: mol_type = other DNA
cacttttgtcaaaaagaccgaa

SEQ ID NO: 68391 - DNA, 22 bp, synthetic construct
  misc_feature 1..22: note = chemically synthesized
  source 1..22: mol_type = other DNA
acttttgtcaaaaagaccgaaa

SEQ ID NO: 68392 - DNA, 22 bp, synthetic construct
  misc_feature 1..22: note = chemically synthesized
  source 1..22: mol_type = other DNA
ttgtcaaaaagaccgaaattga

SEQ ID NO: 68393 - DNA, 22 bp, synthetic construct
  misc_feature 1..22: note = chemically synthesized
  source 1..22: mol_type = other DNA
tgtcaaaaagaccgaaattgaa

SEQ ID NO: 68394 - DNA, 22 bp, synthetic construct
  misc_feature 1..22: note = chemically synthesized
  source 1..22: mol_type = other DNA
gtcaaaaagaccgaaattgaaa

SEQ ID NO: 68395 - DNA, 22 bp, synthetic construct
  misc_feature 1..22: note = chemically synthesized
  source 1..22: mol_type = other DNA
tcaaaaagaccgaaattgaaaa

SEQ ID NO: 68396 - DNA, 22 bp, synthetic construct
  misc_feature 1..22: note = chemically synthesized
  source 1..22: mol_type = other DNA
aaaacaaaacagaaactctggg

SEQ ID NO: 68397 - DNA, 22 bp, synthetic construct
  misc_feature 1..22: note = chemically synthesized
  source 1..22: mol_type = other DNA
tgggaaataactcaccactctt

SEQ ID NO: 68398 - DNA, 22 bp, synthetic construct
  misc_feature 1..22: note = chemically synthesized
  source 1..22: mol_type = other DNA
ggaaataactcaccactcttct

SEQ ID NO: 68399 - DNA, 22 bp, synthetic construct
  misc_feature 1..22: note = chemically synthesized
  source 1..22: mol_type = other DNA
accactcttcttttgtttcagg

SEQ ID NO: 68400 - DNA, 22 bp, synthetic construct
  misc_feature 1..22: note = chemically synthesized
  source 1..22: mol_type = other DNA
ttcttttgtttcaggccttggg

SEQ ID NO: 68401 - DNA, 22 bp, synthetic construct
  misc_feature 1..22: note = chemically synthesized
  source 1..22: mol_type = other DNA
cttttgtttcaggccttgggcc

SEQ ID NO: 68402 - DNA, 22 bp, synthetic construct
  misc_feature 1..22: note = chemically synthesized
  source 1..22: mol_type = other DNA
ttttgtttcaggccttgggcct

SEQ ID NO: 68403 - DNA, 22 bp, synthetic construct
  misc_feature 1..22: note = chemically synthesized
  source 1..22: mol_type = other DNA
ttgtttcaggccttgggcctgt

SEQ ID NO: 68404 - DNA, 22 bp, synthetic construct
  misc_feature 1..22: note = chemically synthesized
  source 1..22: mol_type = other DNA
tgtttcaggccttgggcctgtt

SEQ ID NO: 68405 - DNA, 22 bp, synthetic construct
  misc_feature 1..22: note = chemically synthesized
  source 1..22: mol_type = other DNA
gtttcaggccttgggcctgtta

SEQ ID NO: 68406 - DNA, 22 bp, synthetic construct
  misc_feature 1..22: note = chemically synthesized
  source 1..22: mol_type = other DNA
tttcaggccttgggcctgttaa

SEQ ID NO: 68407 - DNA, 22 bp, synthetic construct
  misc_feature 1..22: note = chemically synthesized
  source 1..22: mol_type = other DNA
caggccttgggcctgttaacta

SEQ ID NO: 68408 - DNA, 22 bp, synthetic construct
  misc_feature 1..22: note = chemically synthesized
  source 1..22: mol_type = other DNA
aggccttgggcctgttaactat

SEQ ID NO: 68409 - DNA, 22 bp, synthetic construct
  misc_feature 1..22: note = chemically synthesized
  source 1..22: mol_type = other DNA
gggcctgttaactatctgcaag

SEQ ID NO: 68410 - DNA, 22 bp, synthetic construct
  misc_feature 1..22: note = chemically synthesized
  source 1..22: mol_type = other DNA
ggcctgttaactatctgcaagg

SEQ ID NO: 68411 - DNA, 22 bp, synthetic construct
  misc_feature 1..22: note = chemically synthesized
  source 1..22: mol_type = other DNA
ttaactatctgcaaggctgttg

SEQ ID NO: 68412 - DNA, 22 bp, synthetic construct
  misc_feature 1..22: note = chemically synthesized
  source 1..22: mol_type = other DNA
actatctgcaaggctgttgtaa

SEQ ID NO: 68413 - DNA, 22 bp, synthetic construct
  misc_feature 1..22: note = chemically synthesized
  source 1..22: mol_type = other DNA
tctgcaaggctgttgtaatgat

SEQ ID NO: 68414 - DNA, 22 bp, synthetic construct
  misc_feature 1..22: note = chemically synthesized
  source 1..22: mol_type = other DNA
caaggctgttgtaatgatgttg

SEQ ID NO: 68415 - DNA, 22 bp, synthetic construct
  misc_feature 1..22: note = chemically synthesized
  source 1..22: mol_type = other DNA
ttgtaatgatgttgtaatctat

SEQ ID NO: 68416 - DNA, 22 bp, synthetic construct
  misc_feature 1..22: note = chemically synthesized
  source 1..22: mol_type = other DNA
taatgatgttgtaatctatttt

SEQ ID NO: 68417 - DNA, 22 bp, synthetic construct
  misc_feature 1..22: note = chemically synthesized
  source 1..22: mol_type = other DNA
taatctattttaatggaattga

SEQ ID NO: 68418 - DNA, 22 bp, synthetic construct
  misc_feature 1..22: note = chemically synthesized
  source 1..22: mol_type = other DNA
ttttaatggaattgaaatgtga

SEQ ID NO: 68419 - DNA, 22 bp, synthetic construct
  misc_feature 1..22: note = chemically synthesized
  source 1..22: mol_type = other DNA
taatggaattgaaatgtgatat

SEQ ID NO: 68420 - DNA, 22 bp, synthetic construct
  misc_feature 1..22: note = chemically synthesized
  source 1..22: mol_type = other DNA
aatggaattgaaatgtgatatc

SEQ ID NO: 68421 - DNA, 22 bp, synthetic construct
  misc_feature 1..22: note = chemically synthesized
  source 1..22: mol_type = other DNA
atggaattgaaatgtgatatcc

SEQ ID NO: 68422 - DNA, 22 bp, synthetic construct
  misc_feature 1..22: note = chemically synthesized
  source 1..22: mol_type = other DNA
aaatgtgatatcctgtggttta

SEQ ID NO: 68423 - DNA, 22 bp, synthetic construct
  misc_feature 1..22: note = chemically synthesized
  source 1..22: mol_type = other DNA
tggtttatgatgcacgttgttt

SEQ ID NO: 68424 - DNA, 22 bp, synthetic construct
  misc_feature 1..22: note = chemically synthesized
  source 1..22: mol_type = other DNA
atgatgcacgttgtttgtagct

SEQ ID NO: 68425 - DNA, 22 bp, synthetic construct
  misc_feature 1..22: note = chemically synthesized
  source 1..22: mol_type = other DNA
tgatgcacgttgtttgtagctg

SEQ ID NO: 68426 - DNA, 22 bp, synthetic construct
  misc_feature 1..22: note = chemically synthesized
  source 1..22: mol_type = other DNA
tttgtagctgtagtgcttgatt

SEQ ID NO: 68427 - DNA, 22 bp, synthetic construct
  misc_feature 1..22: note = chemically synthesized
  source 1..22: mol_type = other DNA
gtagctgtagtgcttgattttg

SEQ ID NO: 68428 - DNA, 22 bp, synthetic construct
  misc_feature 1..22: note = chemically synthesized
  source 1..22: mol_type = other DNA
tagctgtagtgcttgattttgg

SEQ ID NO: 68429 - DNA, 22 bp, synthetic construct
  misc_feature 1..22: note = chemically synthesized
  source 1..22: mol_type = other DNA
tagtgcttgattttgggtttct

SEQ ID NO: 68430 - DNA, 22 bp, synthetic construct
  misc_feature 1..22: note = chemically synthesized
  source 1..22: mol_type = other DNA
gattttgggtttctttcacaga

SEQ ID NO: 68431 - DNA, 22 bp, synthetic construct
  misc_feature 1..22: note = chemically synthesized
  source 1..22: mol_type = other DNA
attttgggtttctttcacagat

SEQ ID NO: 68432 - DNA, 22 bp, synthetic construct
  misc_feature 1..22: note = chemically synthesized
  source 1..22: mol_type = other DNA
tgggtttctttcacagataaac

SEQ ID NO: 68433 - DNA, 22 bp, synthetic construct
  misc_feature 1..22: note = chemically synthesized
  source 1..22: mol_type = other DNA
gggtttctttcacagataaact

SEQ ID NO: 68434 - DNA, 22 bp, synthetic construct
  misc_feature 1..22: note = chemically synthesized
  source 1..22: mol_type = other DNA
ggtttctttcacagataaactt

SEQ ID NO: 68435 - DNA, 22 bp, synthetic construct
  misc_feature 1..22: note = chemically synthesized
  source 1..22: mol_type = other DNA
ctttcacagataaacttctgca

SEQ ID NO: 68436 - DNA, 22 bp, synthetic construct
  misc_feature 1..22: note = chemically synthesized
  source 1..22: mol_type = other DNA
tttcacagataaacttctgcac

SEQ ID NO: 68437 - DNA, 22 bp, synthetic construct
  misc_feature 1..22: note = chemically synthesized
  source 1..22: mol_type = other DNA
tcacagataaacttctgcactg

SEQ ID NO: 68438 - DNA, 22 bp, synthetic construct
  misc_feature 1..22: note = chemically synthesized
  source 1..22: mol_type = other DNA
cacagataaacttctgcactgg

SEQ ID NO: 68439 - DNA, 22 bp, synthetic construct
  misc_feature 1..22: note = chemically synthesized
  source 1..22: mol_type = other DNA
acagataaacttctgcactgga

SEQ ID NO: 68440 - DNA, 22 bp, synthetic construct
  misc_feature 1..22: note = chemically synthesized
  source 1..22: mol_type = other DNA
ctgcactggaggggcctctcct

SEQ ID NO: 68441 - DNA, 22 bp, synthetic construct
  misc_feature 1..22: note = chemically synthesized
  source 1..22: mol_type = other DNA
tgcactggaggggcctctcctc

SEQ ID NO: 68442 - DNA, 22 bp, synthetic construct
  misc_feature 1..22: note = chemically synthesized
  source 1..22: mol_type = other DNA
cactggaggggcctctcctccc

SEQ ID NO: 68443 - DNA, 22 bp, synthetic construct
  misc_feature 1..22: note = chemically synthesized
  source 1..22: mol_type = other DNA
gaggggcctctcctcccctcgt

SEQ ID NO: 68444 - DNA, 22 bp, synthetic construct
  misc_feature 1..22: note = chemically synthesized
  source 1..22: mol_type = other DNA
tcctcccctcgttctgcacatg

SEQ ID NO: 68445 - DNA, 22 bp, synthetic construct
  misc_feature 1..22: note = chemically synthesized
  source 1..22: mol_type = other DNA
ctcccctcgttctgcacatgga

SEQ ID NO: 68446 - DNA, 22 bp, synthetic construct
  misc_feature 1..22: note = chemically synthesized
  source 1..22: mol_type = other DNA
ccctcgttctgcacatggagct

SEQ ID NO: 68447 - DNA, 22 bp, synthetic construct
  misc_feature 1..22: note = chemically synthesized
  source 1..22: mol_type = other DNA
gttctgcacatggagctctaat

SEQ ID NO: 68448 - DNA, 22 bp, synthetic construct
  misc_feature 1..22: note = chemically synthesized
  source 1..22: mol_type = other DNA
tgcacatggagctctaatcccc

SEQ ID NO: 68449 - DNA, 22 bp, synthetic construct
  misc_feature 1..22: note = chemically synthesized
  source 1..22: mol_type = other DNA
cacatggagctctaatccccac

SEQ ID NO: 68450 - DNA, 22 bp, synthetic construct
  misc_feature 1..22: note = chemically synthesized
  source 1..22: mol_type = other DNA
taatccccacgcctgggatgag

SEQ ID NO: 68451 - DNA, 22 bp, synthetic construct
  misc_feature 1..22: note = chemically synthesized
  source 1..22: mol_type = other DNA
atccccacgcctgggatgagtg

SEQ ID NO: 68452 - DNA, 22 bp, synthetic construct
  misc_feature 1..22: note = chemically synthesized
  source 1..22: mol_type = other DNA
ggatgagtgcagaatatgcccc

SEQ ID NO: 68453 - DNA, 22 bp, synthetic construct
  misc_feature 1..22: note = chemically synthesized
  source 1..22: mol_type = other DNA
gtaagttgagccttatttcttc

SEQ ID NO: 68454 - DNA, 22 bp, synthetic construct
  misc_feature 1..22: note = chemically synthesized
  source 1..22: mol_type = other DNA
taagttgagccttatttcttct

SEQ ID NO: 68455 - DNA, 22 bp, synthetic construct
  misc_feature 1..22: note = chemically synthesized
  source 1..22: mol_type = other DNA
agccttatttcttctacaaatg

SEQ ID NO: 68456 - DNA, 22 bp, synthetic construct
  misc_feature 1..22: note = chemically synthesized
  source 1..22: mol_type = other DNA
atttcttctacaaatgtccatg

SEQ ID NO: 68457 - DNA, 22 bp, synthetic construct
  misc_feature 1..22: note = chemically synthesized
  source 1..22: mol_type = other DNA
tttcttctacaaatgtccatgt

SEQ ID NO: 68458 - DNA, 22 bp, synthetic construct
  misc_feature 1..22: note = chemically synthesized
  source 1..22: mol_type = other DNA
cttctacaaatgtccatgtgta

SEQ ID NO: 68459 - DNA, 22 bp, synthetic construct
  misc_feature 1..22: note = chemically synthesized
  source 1..22: mol_type = other DNA
ttctacaaatgtccatgtgtat

SEQ ID NO: 68460 - DNA, 22 bp, synthetic construct
  misc_feature 1..22: note = chemically synthesized
  source 1..22: mol_type = other DNA
ctacaaatgtccatgtgtatag

SEQ ID NO: 68461 - DNA, 22 bp, synthetic construct
  misc_feature 1..22: note = chemically synthesized
  source 1..22: mol_type = other DNA
tacaaatgtccatgtgtataga

SEQ ID NO: 68462 - DNA, 22 bp, synthetic construct
  misc_feature 1..22: note = chemically synthesized
  source 1..22: mol_type = other DNA
caaatgtccatgtgtatagaga

SEQ ID NO: 68463 - DNA, 22 bp, synthetic construct
  misc_feature 1..22: note = chemically synthesized
  source 1..22: mol_type = other DNA
ctggaaattgcccttacttttt

SEQ ID NO: 68464 - DNA, 22 bp, synthetic construct
  misc_feature 1..22: note = chemically synthesized
  source 1..22: mol_type = other DNA
tggaaattgcccttacttttta

SEQ ID NO: 68465 - DNA, 22 bp, synthetic construct
  misc_feature 1..22: note = chemically synthesized
  source 1..22: mol_type = other DNA
gaaattgcccttactttttaag

SEQ ID NO: 68466 - DNA, 22 bp, synthetic construct
  misc_feature 1..22: note = chemically synthesized
  source 1..22: mol_type = other DNA
cccttactttttaagtactgaa

SEQ ID NO: 68467 - DNA, 22 bp, synthetic construct
  misc_feature 1..22: note = chemically synthesized
  source 1..22: mol_type = other DNA
actttttaagtactgaaggagt

SEQ ID NO: 68468 - DNA, 22 bp, synthetic construct
  misc_feature 1..22: note = chemically synthesized
  source 1..22: mol_type = other DNA
ctttttaagtactgaaggagtt

SEQ ID NO: 68469 - DNA, 22 bp, synthetic construct
  misc_feature 1..22: note = chemically synthesized
  source 1..22: mol_type = other DNA
tttaagtactgaaggagttact

SEQ ID NO: 68470 - DNA, 22 bp, synthetic construct
  misc_feature 1..22: note = chemically synthesized
  source 1..22: mol_type = other DNA
ttaagtactgaaggagttactt

SEQ ID NO: 68471 - DNA, 22 bp, synthetic construct
  misc_feature 1..22: note = chemically synthesized
  source 1..22: mol_type = other DNA
taagtactgaaggagttacttc

SEQ ID NO: 68472 - DNA, 22 bp, synthetic construct
  misc_feature 1..22: note = chemically synthesized
  source 1..22: mol_type = other DNA
aagtactgaaggagttacttcc

SEQ ID NO: 68473 - DNA, 22 bp, synthetic construct
  misc_feature 1..22: note = chemically synthesized
  source 1..22: mol_type = other DNA
agtactgaaggagttacttcca

SEQ ID NO: 68474 - DNA, 22 bp, synthetic construct
  misc_feature 1..22: note = chemically synthesized
  source 1..22: mol_type = other DNA
aaggagttacttccaaaataga

SEQ ID NO: 68475 - DNA, 22 bp, synthetic construct
  misc_feature 1..22: note = chemically synthesized
  source 1..22: mol_type = other DNA
cttccaaaatagattgtcatat

SEQ ID NO: 68476 - DNA, 22 bp, synthetic construct
  misc_feature 1..22: note = chemically synthesized
  source 1..22: mol_type = other DNA
ccaaaatagattgtcatatgta

SEQ ID NO: 68477 - DNA, 22 bp, synthetic construct
  misc_feature 1..22: note = chemically synthesized
  source 1..22: mol_type = other DNA
caaaatagattgtcatatgtat

SEQ ID NO: 68478 - DNA, 22 bp, synthetic construct
  misc_feature 1..22: note = chemically synthesized
  source 1..22: mol_type = other DNA
tcatatgtattattccattact

SEQ ID NO: 68479 - DNA, 22 bp, synthetic construct
  misc_feature 1..22: note = chemically synthesized
  source 1..22: mol_type = other DNA
ttccattactcacttggcagcc

SEQ ID NO: 68480 - DNA, 22 bp, synthetic construct
  misc_feature 1..22: note = chemically synthesized
  source 1..22: mol_type = other DNA
cattactcacttggcagccgct

SEQ ID NO: 68481 - DNA, 22 bp, synthetic construct
  misc_feature 1..22: note = chemically synthesized
  source 1..22: mol_type = other DNA
ctcacttggcagccgctcccca

SEQ ID NO: 68482 - DNA, 22 bp, synthetic construct
  misc_feature 1..22: note = chemically synthesized
  source 1..22: mol_type = other DNA
acttggcagccgctccccactc

SEQ ID NO: 68483 - DNA, 22 bp, synthetic construct
  misc_feature 1..22: note = chemically synthesized
  source 1..22: mol_type = other DNA
ggcagccgctccccactccact

SEQ ID NO: 68484 - DNA, 22 bp, synthetic construct
  misc_feature 1..22: note = chemically synthesized
  source 1..22: mol_type = other DNA
gcagccgctccccactccactc

SEQ ID NO: 68485 - DNA, 22 bp, synthetic construct
  misc_feature 1..22: note = chemically synthesized
  source 1..22: mol_type = other DNA
cccactccactcagccccagag

SEQ ID NO: 68486 - DNA, 22 bp, synthetic construct
  misc_feature 1..22: note = chemically synthesized
  source 1..22: mol_type = other DNA
cactcagccccagagggacttc

SEQ ID NO: 68487 - DNA, 22 bp, synthetic construct
  misc_feature 1..22: note = chemically synthesized
  source 1..22: mol_type = other DNA
agccccagagggacttcttccc

SEQ ID NO: 68488 - DNA, 22 bp, synthetic construct
  misc_feature 1..22: note = chemically synthesized
  source 1..22: mol_type = other DNA
cttccctcccctttttctttcc

SEQ ID NO: 68489 - DNA, 22 bp, synthetic construct
  misc_feature 1..22: note = chemically synthesized
  source 1..22: mol_type = other DNA
ttccctcccctttttctttcct

SEQ ID NO: 68490 - DNA, 22 bp, synthetic construct
  misc_feature 1..22: note = chemically synthesized
  source 1..22: mol_type = other DNA
ccctcccctttttctttcctca

SEQ ID NO: 68491 - DNA, 22 bp, synthetic construct
  misc_feature 1..22: note = chemically synthesized
  source 1..22: mol_type = other DNA
cctcccctttttctttcctcac

SEQ ID NO: 68492 - DNA, 22 bp, synthetic construct
  misc_feature 1..22: note = chemically synthesized
  source 1..22: mol_type = other DNA
ccctttttctttcctcactgga

SEQ ID NO: 68493 - DNA, 22 bp, synthetic construct
  misc_feature 1..22: note = chemically synthesized
  source 1..22: mol_type = other DNA
tttctttcctcactggaggctg

SEQ ID NO: 68494 - DNA, 22 bp, synthetic construct
  misc_feature 1..22: note = chemically synthesized
  source 1..22: mol_type = other DNA
ttctttcctcactggaggctgg

SEQ ID NO: 68495 - DNA, 22 bp, synthetic construct
  misc_feature 1..22: note = chemically synthesized
  source 1..22: mol_type = other DNA
tctttcctcactggaggctggg

SEQ ID NO: 68496 - DNA, 22 bp, synthetic construct
  misc_feature 1..22: note = chemically synthesized
  source 1..22: mol_type = other DNA
ctttcctcactggaggctggga

SEQ ID NO: 68497 - DNA, 22 bp, synthetic construct
  misc_feature 1..22: note = chemically synthesized
  source 1..22: mol_type = other DNA
tttcctcactggaggctgggag

SEQ ID NO: 68498 - DNA, 22 bp, synthetic construct
  misc_feature 1..22: note = chemically synthesized
  source 1..22: mol_type = other DNA
tcctcactggaggctgggagct

SEQ ID NO: 68499 - DNA, 22 bp, synthetic construct
  misc_feature 1..22: note = chemically synthesized
  source 1..22: mol_type = other DNA
cctcactggaggctgggagctg

SEQ ID NO: 68500 - DNA, 22 bp, synthetic construct
  misc_feature 1..22: note = chemically synthesized
  source 1..22: mol_type = other DNA
ctcactggaggctgggagctga

SEQ ID NO: 68501 - DNA, 22 bp, synthetic construct
  misc_feature 1..22: note = chemically synthesized
  source 1..22: mol_type = other DNA
actggaggctgggagctgatag

SEQ ID NO: 68502 - DNA, 22 bp, synthetic construct
  misc_feature 1..22: note = chemically synthesized
  source 1..22: mol_type = other DNA
gaggctgggagctgatagtagc

SEQ ID NO: 68503 - DNA, 22 bp, synthetic construct
  misc_feature 1..22: note = chemically synthesized
  source 1..22: mol_type = other DNA
ggagctgatagtagctcatccc

SEQ ID NO: 68504 - DNA, 22 bp, synthetic construct
  misc_feature 1..22: note = chemically synthesized
  source 1..22: mol_type = other DNA
atagtagctcatccctgtgggt

SEQ ID NO: 68505 - DNA, 22 bp, synthetic construct
  misc_feature 1..22: note = chemically synthesized
  source 1..22: mol_type = other DNA
atccctgtgggtcttctcccca

SEQ ID NO: 68506 - DNA, 22 bp, synthetic construct
  misc_feature 1..22: note = chemically synthesized
  source 1..22: mol_type = other DNA
tgggtcttctccccagggtctt

SEQ ID NO: 68507 - DNA, 22 bp, synthetic construct
  misc_feature 1..22: note = chemically synthesized
  source 1..22: mol_type = other DNA
ctccccagggtcttgtcttgct

SEQ ID NO: 68508 - DNA, 22 bp, synthetic construct
  misc_feature 1..22: note = chemically synthesized
  source 1..22: mol_type = other DNA
tccccagggtcttgtcttgctc

SEQ ID NO: 68509 - DNA, 22 bp, synthetic construct
  misc_feature 1..22: note = chemically synthesized
  source 1..22: mol_type = other DNA
cccagggtcttgtcttgctccg

SEQ ID NO: 68510 - DNA, 22 bp, synthetic construct
  misc_feature 1..22: note = chemically synthesized
  source 1..22: mol_type = other DNA
gtcttgctccgtggctagtgat

SEQ ID NO: 68511 - DNA, 22 bp, synthetic construct
  misc_feature 1..22: note = chemically synthesized
  source 1..22: mol_type = other DNA
tcttgctccgtggctagtgatt

SEQ ID NO: 68512 - DNA, 22 bp, synthetic construct
  misc_feature 1..22: note = chemically synthesized
  source 1..22: mol_type = other DNA
gctccgtggctagtgattgaag

SEQ ID NO: 68513 - DNA, 22 bp, synthetic construct
  misc_feature 1..22: note = chemically synthesized
  source 1..22: mol_type = other DNA
ctccgtggctagtgattgaaga

SEQ ID NO: 68514 - DNA, 22 bp, synthetic construct
  misc_feature 1..22: note = chemically synthesized
  source 1..22: mol_type = other DNA
cgtggctagtgattgaagatgc

SEQ ID NO: 68515 - DNA, 22 bp, synthetic construct
  misc_feature 1..22: note = chemically synthesized
  source 1..22: mol_type = other DNA
gtgattgaagatgcctgtgcct

SEQ ID NO: 68516 - DNA, 22 bp, synthetic construct
  misc_feature 1..22: note = chemically synthesized
  source 1..22: mol_type = other DNA
aagatgcctgtgcctctggagc

SEQ ID NO: 68517 - DNA, 22 bp, synthetic construct
  misc_feature 1..22: note = chemically synthesized
  source 1..22: mol_type = other DNA
tgcctctggagcccattttatt

SEQ ID NO: 68518 - DNA, 22 bp, synthetic construct
  misc_feature 1..22: note = chemically synthesized
  source 1..22: mol_type = other DNA
tggagcccattttattactgga

SEQ ID NO: 68519 - DNA, 22 bp, synthetic construct
  misc_feature 1..22: note = chemically synthesized
  source 1..22: mol_type = other DNA
gagcccattttattactggaca

SEQ ID NO: 68520 - DNA, 22 bp, synthetic construct
  misc_feature 1..22: note = chemically synthesized
  source 1..22: mol_type = other DNA
tattactggacattcactcctg

SEQ ID NO: 68521 - DNA, 22 bp, synthetic construct
  misc_feature 1..22: note = chemically synthesized
  source 1..22: mol_type = other DNA
attactggacattcactcctgt

SEQ ID NO: 68522 - DNA, 22 bp, synthetic construct
  misc_feature 1..22: note = chemically synthesized
  source 1..22: mol_type = other DNA
ttactggacattcactcctgtg

SEQ ID NO: 68523 - DNA, 22 bp, synthetic construct
  misc_feature 1..22: note = chemically synthesized
  source 1..22: mol_type = other DNA
ctggacattcactcctgtggcc

SEQ ID NO: 68524 - DNA, 22 bp, synthetic construct
  misc_feature 1..22: note = chemically synthesized
  source 1..22: mol_type = other DNA
gacattcactcctgtggcctca

SEQ ID NO: 68525 - DNA, 22 bp, synthetic construct
  misc_feature 1..22: note = chemically synthesized
  source 1..22: mol_type = other DNA
actcctgtggcctcatttagga

SEQ ID NO: 68526 - DNA, 22 bp, synthetic construct
  misc_feature 1..22: note = chemically synthesized
  source 1..22: mol_type = other DNA
ctgtggcctcatttaggacttt

SEQ ID NO: 68527 - DNA, 22 bp, synthetic construct
  misc_feature 1..22: note = chemically synthesized
  source 1..22: mol_type = other DNA
tggcctcatttaggactttggg

SEQ ID NO: 68528 - DNA, 22 bp, synthetic construct
  misc_feature 1..22: note = chemically synthesized
  source 1..22: mol_type = other DNA
atttaggactttgggtatagtc

SEQ ID NO: 68529 - DNA, 22 bp, synthetic construct
  misc_feature 1..22: note = chemically synthesized
  source 1..22: mol_type = other DNA
aggactttgggtatagtccatg

SEQ ID NO: 68530 - DNA, 22 bp, synthetic construct
  misc_feature 1..22: note = chemically synthesized
  source 1..22: mol_type = other DNA
ggactttgggtatagtccatgg

SEQ ID NO: 68531 - DNA, 22 bp, synthetic construct
  misc_feature 1..22: note = chemically synthesized
  source 1..22: mol_type = other DNA
tgggtatagtccatggcacaca

SEQ ID NO: 68532 - DNA, 22 bp, synthetic construct
  misc_feature 1..22: note = chemically synthesized
  source 1..22: mol_type = other DNA
gggtatagtccatggcacacat

SEQ ID NO: 68533 - DNA, 22 bp, synthetic construct
  misc_feature 1..22: note = chemically synthesized
  source 1..22: mol_type = other DNA
ggtatagtccatggcacacatc

SEQ ID NO: 68534 - DNA, 22 bp, synthetic construct
  misc_feature 1..22: note = chemically synthesized
  source 1..22: mol_type = other DNA
tagccaaggccagaatcaaaag

SEQ ID NO: 68535 - DNA, 22 bp, synthetic construct
  misc_feature 1..22: note = chemically synthesized
  source 1..22: mol_type = other DNA
agccaaggccagaatcaaaagg

SEQ ID NO: 68536 - DNA, 22 bp, synthetic construct
  misc_feature 1..22: note = chemically synthesized
  source 1..22: mol_type = other DNA
gccaaggccagaatcaaaagga

SEQ ID NO: 68537 - DNA, 22 bp, synthetic construct
  misc_feature 1..22: note = chemically synthesized
  source 1..22: mol_type = other DNA
agggttattccagagttattcc

SEQ ID NO: 68538 - DNA, 22 bp, synthetic construct
  misc_feature 1..22: note = chemically synthesized
  source 1..22: mol_type = other DNA
gggttattccagagttattcca

SEQ ID NO: 68539 - DNA, 22 bp, synthetic construct
  misc_feature 1..22: note = chemically synthesized
  source 1..22: mol_type = other DNA
ttccagagttattccaatgcat

SEQ ID NO: 68540 - DNA, 22 bp, synthetic construct
  misc_feature 1..22: note = chemically synthesized
  source 1..22: mol_type = other DNA
cagagttattccaatgcatatt

SEQ ID NO: 68541 - DNA, 22 bp, synthetic construct
  misc_feature 1..22: note = chemically synthesized
  source 1..22: mol_type = other DNA
ttccaatgcatattccttatgt

SEQ ID NO: 68542 - DNA, 22 bp, synthetic construct
  misc_feature 1..22: note = chemically synthesized
  source 1..22: mol_type = other DNA
caatgcatattccttatgtatt

SEQ ID NO: 68543 - DNA, 22 bp, synthetic construct
  misc_feature 1..22: note = chemically synthesized
  source 1..22: mol_type = other DNA
cttatgtatttacatgtgtatt

SEQ ID NO: 68544 - DNA, 22 bp, synthetic construct
  misc_feature 1..22: note = chemically synthesized
  source 1..22: mol_type = other DNA
atgtatttacatgtgtatttga

SEQ ID NO: 68545 - DNA, 22 bp, synthetic construct
  misc_feature 1..22: note = chemically synthesized
  source 1..22: mol_type = other DNA
tgtatttacatgtgtatttgaa

SEQ ID NO: 68546 - DNA, 22 bp, synthetic construct
  misc_feature 1..22: note = chemically synthesized
  source 1..22: mol_type = other DNA
acatgtgtatttgaacatagta

SEQ ID NO: 68547 - DNA, 22 bp, synthetic construct
  misc_feature 1..22: note = chemically synthesized
  source 1..22: mol_type = other DNA
catgtgtatttgaacatagtat

SEQ ID NO: 68548 - DNA, 22 bp, synthetic construct
  misc_feature 1..22: note = chemically synthesized
  source 1..22: mol_type = other DNA
gaacatagtatatgttgtatat

SEQ ID NO: 68549 - DNA, 22 bp, synthetic construct
  misc_feature 1..22: note = chemically synthesized
  source 1..22: mol_type = other DNA
aacatagtatatgttgtatatt

SEQ ID NO: 68550 - DNA, 22 bp, synthetic construct
  misc_feature 1..22: note = chemically synthesized
  source 1..22: mol_type = other DNA
tatattcatgcccacacataat

SEQ ID NO: 68551 - DNA, 22 bp, synthetic construct
  misc_feature 1..22: note = chemically synthesized
  source 1..22: mol_type = other DNA
atgcccacacataattttgact

SEQ ID NO: 68552 - DNA, 22 bp, synthetic construct
  misc_feature 1..22: note = chemically synthesized
  source 1..22: mol_type = other DNA
tgactaatttttctcctggttt

SEQ ID NO: 68553 - DNA, 22 bp, synthetic construct
  misc_feature 1..22: note = chemically synthesized
  source 1..22: mol_type = other DNA
gactaatttttctcctggtttt

SEQ ID NO: 68554 - DNA, 22 bp, synthetic construct
  misc_feature 1..22: note = chemically synthesized
  source 1..22: mol_type = other DNA
actaatttttctcctggtttta

SEQ ID NO: 68555 - DNA, 22 bp, synthetic construct
  misc_feature 1..22: note = chemically synthesized
  source 1..22: mol_type = other DNA
atttttctcctggttttagaga

SEQ ID NO: 68556 - DNA, 22 bp, synthetic construct
  misc_feature 1..22: note = chemically synthesized
  source 1..22: mol_type = other DNA
ttctcctggttttagagaaaaa

SEQ ID NO: 68557 - DNA, 22 bp, synthetic construct
  misc_feature 1..22: note = chemically synthesized
  source 1..22: mol_type = other DNA
tctcctggttttagagaaaaat

SEQ ID NO: 68558 - DNA, 22 bp, synthetic construct
  misc_feature 1..22: note = chemically synthesized
  source 1..22: mol_type = other DNA
ctcctggttttagagaaaaatg

SEQ ID NO: 68559 - DNA, 22 bp, synthetic construct
  misc_feature 1..22: note = chemically synthesized
  source 1..22: mol_type = other DNA
tcctggttttagagaaaaatgc

SEQ ID NO: 68560 - DNA, 22 bp, synthetic construct
  misc_feature 1..22: note = chemically synthesized
  source 1..22: mol_type = other DNA
ctggttttagagaaaaatgcac

SEQ ID NO: 68561 - DNA, 22 bp, synthetic construct
  misc_feature 1..22: note = chemically synthesized
  source 1..22: mol_type = other DNA
gttttagagaaaaatgcacatc

SEQ ID NO: 68562 - DNA, 22 bp, synthetic construct
  misc_feature 1..22: note = chemically synthesized
  source 1..22: mol_type = other DNA
tagagaaaaatgcacatcattg

SEQ ID NO: 68563 - DNA, 22 bp, synthetic construct
  misc_feature 1..22: note = chemically synthesized
  source 1..22: mol_type = other DNA
agagaaaaatgcacatcattgt

SEQ ID NO: 68564 - DNA, 22 bp, synthetic construct
  misc_feature 1..22: note = chemically synthesized
  source 1..22: mol_type = other DNA
gagaaaaatgcacatcattgta

SEQ ID NO: 68565 - DNA, 22 bp, synthetic construct
  misc_feature 1..22: note = chemically synthesized
  source 1..22: mol_type = other DNA
tagttaaaatgtgaaggctcta

SEQ ID NO: 68566 - DNA, 22 bp, synthetic construct
  misc_feature 1..22: note = chemically synthesized
  source 1..22: mol_type = other DNA
aaatgtgaaggctctactatca

SEQ ID NO: 68567 - DNA, 22 bp, synthetic construct
  misc_feature 1..22: note = chemically synthesized
  source 1..22: mol_type = other DNA
tactatcaccaccaccaccacc

SEQ ID NO: 68568 - DNA, 22 bp, synthetic construct
  misc_feature 1..22: note = chemically synthesized
  source 1..22: mol_type = other DNA
ctatcaccaccaccaccaccac

SEQ ID NO: 68569 - DNA, 22 bp, synthetic construct
  misc_feature 1..22: note = chemically synthesized
  source 1..22: mol_type = other DNA
tcaccaccaccaccaccaccat

SEQ ID NO: 68570 - DNA, 22 bp, synthetic construct
  misc_feature 1..22: note = chemically synthesized
  source 1..22: mol_type = other DNA
ccaccatcaccaccaccaccac

SEQ ID NO: 68571 - DNA, 22 bp, synthetic construct
  misc_feature 1..22: note = chemically synthesized
  source 1..22: mol_type = other DNA
ccaccaccaccatcaccaccag

SEQ ID NO: 68572 - DNA, 22 bp, synthetic construct
  misc_feature 1..22: note = chemically synthesized
  source 1..22: mol_type = other DNA
ccaccaccaccaccatcaccac

SEQ ID NO: 68573 - DNA, 22 bp, synthetic construct
  misc_feature 1..22: note = chemically synthesized
  source 1..22: mol_type = other DNA
ccaccaccatcactaccaccac

SEQ ID NO: 68574 - DNA, 22 bp, synthetic construct
  misc_feature 1..22: note = chemically synthesized
  source 1..22: mol_type = other DNA
ccaccaccaccatcaccaccag

SEQ ID NO: 68575 - DNA, 22 bp, synthetic construct
  misc_feature 1..22: note = chemically synthesized
  source 1..22: mol_type = other DNA
ccaccaccaccaccaccaccat

SEQ ID NO: 68576 - DNA, 22 bp, synthetic construct
  misc_feature 1..22: note = chemically synthesized
  source 1..22: mol_type = other DNA
ccaccaccatcactaccaccac

SEQ ID NO: 68577 - DNA, 22 bp, synthetic construct
  misc_feature 1..22: note = chemically synthesized
  source 1..22: mol_type = other DNA
ccaccaccaccatcaccaccag

SEQ ID NO: 68578 - DNA, 22 bp, synthetic construct
  misc_feature 1..22: note = chemically synthesized
  source 1..22: mol_type = other DNA
caccaccaccattaccaccacc

SEQ ID NO: 68579 - DNA, 22 bp, synthetic construct
  misc_feature 1..22: note = chemically synthesized
  source 1..22: mol_type = other DNA
ccaccaccatcactaccaccac

SEQ ID NO: 68580 - DNA, 22 bp, synthetic construct
  misc_feature 1..22: note = chemically synthesized
  source 1..22: mol_type = other DNA
ccaccaccaccatcaccaccag

SEQ ID NO: 68581 - DNA, 22 bp, synthetic construct
  misc_feature 1..22: note = chemically synthesized
  source 1..22: mol_type = other DNA
ccaccaccatcactaccaccac

SEQ ID NO: 68582 - DNA, 22 bp, synthetic construct
  misc_feature 1..22: note = chemically synthesized
  source 1..22: mol_type = other DNA
ccaccaccaccaccatcaccac

SEQ ID NO: 68583 - DNA, 22 bp, synthetic construct
  misc_feature 1..22: note = chemically synthesized
  source 1..22: mol_type = other DNA
ccaccaccatcactaccaccac

SEQ ID NO: 68584 - DNA, 22 bp, synthetic construct
  misc_feature 1..22: note = chemically synthesized
  source 1..22: mol_type = other DNA
ccaccaccaccatcaccagtac

SEQ ID NO: 68585 - DNA, 22 bp, synthetic construct
  misc_feature 1..22: note = chemically synthesized
  source 1..22: mol_type = other DNA
ccaccaccatcaccaccaccac

SEQ ID NO: 68586 - DNA, 22 bp, synthetic construct
  misc_feature 1..22: note = chemically synthesized
  source 1..22: mol_type = other DNA
ccaccaccatcactaccaccac

SEQ ID NO: 68587 - DNA, 22 bp, synthetic construct
  misc_feature 1..22: note = chemically synthesized
  source 1..22: mol_type = other DNA
ccaccaccaccatcaccagtac

SEQ ID NO: 68588 - DNA, 22 bp, synthetic construct
  misc_feature 1..22: note = chemically synthesized
  source 1..22: mol_type = other DNA
ccaccaccatcactaccaccac

SEQ ID NO: 68589 - DNA, 22 bp, synthetic construct
  misc_feature 1..22: note = chemically synthesized
  source 1..22: mol_type = other DNA
ccaccaccaccaccatcaccac

SEQ ID NO: 68590 - DNA, 22 bp, synthetic construct
  misc_feature 1..22: note = chemically synthesized
  source 1..22: mol_type = other DNA
ccaccaccatcactaccaccac

SEQ ID NO: 68591 - DNA, 22 bp, synthetic construct
  misc_feature 1..22: note = chemically synthesized
  source 1..22: mol_type = other DNA
ccaccaccaccaccatcaccac

SEQ ID NO: 68592 - DNA, 22 bp, synthetic construct
  misc_feature 1..22: note = chemically synthesized
  source 1..22: mol_type = other DNA
ccaccaccatcactaccaccac

SEQ ID NO: 68593 - DNA, 22 bp, synthetic construct
  misc_feature 1..22: note = chemically synthesized
  source 1..22: mol_type = other DNA
ccaccaccaccatcaccagtac

SEQ ID NO: 68594 - DNA, 22 bp, synthetic construct
  misc_feature 1..22: note = chemically synthesized
  source 1..22: mol_type = other DNA
ccaccaccatcatcaccaccac

SEQ ID NO: 68595 - DNA, 22 bp, synthetic construct
  misc_feature 1..22: note = chemically synthesized
  source 1..22: mol_type = other DNA
ccaccaccatttacttgttcaa

SEQ ID NO: 68596 - DNA, 22 bp, synthetic construct
  misc_feature 1..22: note = chemically synthesized
  source 1..22: mol_type = other DNA
acttgttcaagtgagcttttat

SEQ ID NO: 68597 - DNA, 22 bp, synthetic construct
  misc_feature 1..22: note = chemically synthesized
  source 1..22: mol_type = other DNA
cttgttcaagtgagcttttata

SEQ ID NO: 68598 - DNA, 22 bp, synthetic construct
  misc_feature 1..22: note = chemically synthesized
  source 1..22: mol_type = other DNA
gttcaagtgagcttttatagta

SEQ ID NO: 68599 - DNA, 22 bp, synthetic construct
  misc_feature 1..22: note = chemically synthesized
  source 1..22: mol_type = other DNA
ttcaagtgagcttttatagtag

SEQ ID NO: 68600 - DNA, 22 bp, synthetic construct
  misc_feature 1..22: note = chemically synthesized
  source 1..22: mol_type = other DNA
aagtgagcttttatagtaggga

SEQ ID NO: 68601 - DNA, 22 bp, synthetic construct
  misc_feature 1..22: note = chemically synthesized
  source 1..22: mol_type = other DNA
ttatagtagggaccattttatg

SEQ ID NO: 68602 - DNA, 22 bp, synthetic construct
  misc_feature 1..22: note = chemically synthesized
  source 1..22: mol_type = other DNA
tatagtagggaccattttatga

SEQ ID NO: 68603 - DNA, 22 bp, synthetic construct
  misc_feature 1..22: note = chemically synthesized
  source 1..22: mol_type = other DNA
atagtagggaccattttatgaa

SEQ ID NO: 68604 - DNA, 22 bp, synthetic construct
  misc_feature 1..22: note = chemically synthesized
  source 1..22: mol_type = other DNA
tagtagggaccattttatgaaa

SEQ ID NO: 68605 - DNA, 22 bp, synthetic construct
  misc_feature 1..22: note = chemically synthesized
  source 1..22: mol_type = other DNA
tatgaaacttaaatttgtccat

SEQ ID NO: 68606 - DNA, 22 bp, synthetic construct
  misc_feature 1..22: note = chemically synthesized
  source 1..22: mol_type = other DNA
atgaaacttaaatttgtccatt

SEQ ID NO: 68607 - DNA, 22 bp, synthetic construct
  misc_feature 1..22: note = chemically synthesized
  source 1..22: mol_type = other DNA
tgaaacttaaatttgtccattt

SEQ ID NO: 68608 - DNA, 22 bp, synthetic construct
  misc_feature 1..22: note = chemically synthesized
  source 1..22: mol_type = other DNA
aaatttgtccatttatacaaat

SEQ ID NO: 68609 - DNA, 22 bp, synthetic construct
  misc_feature 1..22: note = chemically synthesized
  source 1..22: mol_type = other DNA
aatttgtccatttatacaaatg

SEQ ID NO: 68610 - DNA, 22 bp, synthetic construct
  misc_feature 1..22: note = chemically synthesized
  source 1..22: mol_type = other DNA
gtccatttatacaaatgttttc

SEQ ID NO: 68611 - DNA, 22 bp, synthetic construct
  misc_feature 1..22: note = chemically synthesized
  source 1..22: mol_type = other DNA
tccatttatacaaatgttttct

SEQ ID NO: 68612 - DNA, 22 bp, synthetic construct
  misc_feature 1..22: note = chemically synthesized
  source 1..22: mol_type = other DNA
atacaaatgttttctgaaagat

SEQ ID NO: 68613 - DNA, 22 bp, synthetic construct
  misc_feature 1..22: note = chemically synthesized
  source 1..22: mol_type = other DNA
tacaaatgttttctgaaagata

SEQ ID NO: 68614 - DNA, 22 bp, synthetic construct
  misc_feature 1..22: note = chemically synthesized
  source 1..22: mol_type = other DNA
tctgaaagatactgttttagaa

SEQ ID NO: 68615 - DNA, 22 bp, synthetic construct
  misc_feature 1..22: note = chemically synthesized
  source 1..22: mol_type = other DNA
ctgaaagatactgttttagaaa

SEQ ID NO: 68616 - DNA, 22 bp, synthetic construct
  misc_feature 1..22: note = chemically synthesized
  source 1..22: mol_type = other DNA
tgaaagatactgttttagaaaa

SEQ ID NO: 68617 - DNA, 22 bp, synthetic construct
  misc_feature 1..22: note = chemically synthesized
  source 1..22: mol_type = other DNA
aaagatactgttttagaaaata

SEQ ID NO: 68618 - DNA, 22 bp, synthetic construct
  misc_feature 1..22: note = chemically synthesized
  source 1..22: mol_type = other DNA
ttttagaaaataatacagtttg

SEQ ID NO: 68619 - DNA, 22 bp, synthetic construct
  misc_feature 1..22: note = chemically synthesized
  source 1..22: mol_type = other DNA
tagaaaataatacagtttgctt

SEQ ID NO: 68620 - DNA, 22 bp, synthetic construct
  misc_feature 1..22: note = chemically synthesized
  source 1..22: mol_type = other DNA
agaaaataatacagtttgcttc

SEQ ID NO: 68621 - DNA, 22 bp, synthetic construct
  misc_feature 1..22: note = chemically synthesized
  source 1..22: mol_type = other DNA
gaaaataatacagtttgcttct

SEQ ID NO: 68622 - DNA, 22 bp, synthetic construct
  misc_feature 1..22: note = chemically synthesized
  source 1..22: mol_type = other DNA
gcttctctgtgtaggaacacat

SEQ ID NO: 68623 - DNA, 22 bp, synthetic construct
  misc_feature 1..22: note = chemically synthesized
  source 1..22: mol_type = other DNA
cttctctgtgtaggaacacatg

SEQ ID NO: 68624 - DNA, 22 bp, synthetic construct
  misc_feature 1..22: note = chemically synthesized
  source 1..22: mol_type = other DNA
ctctgtgtaggaacacatggta

SEQ ID NO: 68625 - DNA, 22 bp, synthetic construct
  misc_feature 1..22: note = chemically synthesized
  source 1..22: mol_type = other DNA
tctgtgtaggaacacatggtat

SEQ ID NO: 68626 - DNA, 22 bp, synthetic construct
  misc_feature 1..22: note = chemically synthesized
  source 1..22: mol_type = other DNA
tgtgtaggaacacatggtatga

SEQ ID NO: 68627 - DNA, 22 bp, synthetic construct
  misc_feature 1..22: note = chemically synthesized
  source 1..22: mol_type = other DNA
tgtaggaacacatggtatgaat

SEQ ID NO: 68628 - DNA, 22 bp, synthetic construct
  misc_feature 1..22: note = chemically synthesized
  source 1..22: mol_type = other DNA
aaaggttagggggtgggcagtg

SEQ ID NO: 68629 - DNA, 22 bp, synthetic construct
  misc_feature 1..22: note = chemically synthesized
  source 1..22: mol_type = other DNA
gggggtgggcagtgattccacc

SEQ ID NO: 68630 - DNA, 22 bp, synthetic construct
  misc_feature 1..22: note = chemically synthesized
  source 1..22: mol_type = other DNA
caccctaaacacaaaaaagcag

SEQ ID NO: 68631 - DNA, 22 bp, synthetic construct
  misc_feature 1..22: note = chemically synthesized
  source 1..22: mol_type = other DNA
aacacaaaaaagcaggttcaag

SEQ ID NO: 68632 - DNA, 22 bp, synthetic construct
  misc_feature 1..22: note = chemically synthesized
  source 1..22: mol_type = other DNA
aagaagaaaagaagtgtgacat

SEQ ID NO: 68633 - DNA, 22 bp, synthetic construct
  misc_feature 1..22: note = chemically synthesized
  source 1..22: mol_type = other DNA
atttttatttgaaagtaaatga

SEQ ID NO: 68634 - DNA, 22 bp, synthetic construct
  misc_feature 1..22: note = chemically synthesized
  source 1..22: mol_type = other DNA
ttatttgaaagtaaatgaaaaa

SEQ ID NO: 68635 - DNA, 22 bp, synthetic construct
  misc_feature 1..22: note = chemically synthesized
  source 1..22: mol_type = other DNA
tatttgaaagtaaatgaaaaat

SEQ ID NO: 68636 - DNA, 22 bp, synthetic construct
  misc_feature 1..22: note = chemically synthesized
  source 1..22: mol_type = other DNA
atttgaaagtaaatgaaaaata

SEQ ID NO: 68637 - DNA, 22 bp, synthetic construct
  misc_feature 1..22: note = chemically synthesized
  source 1..22: mol_type = other DNA
tttgaaagtaaatgaaaaataa

SEQ ID NO: 68638 - DNA, 22 bp, synthetic construct
  misc_feature 1..22: note = chemically synthesized
  source 1..22: mol_type = other DNA
gaaagtaaatgaaaaataacct

SEQ ID NO: 68639 - DNA, 22 bp, synthetic construct
  misc_feature 1..22: note = chemically synthesized
  source 1..22: mol_type = other DNA
aaagtaaatgaaaaataacctg

SEQ ID NO: 68640 - DNA, 22 bp, synthetic construct
  misc_feature 1..22: note = chemically synthesized
  source 1..22: mol_type = other DNA
ctgtggaaagaaaaaaaaagaa

SEQ ID NO: 68641 - DNA, 22 bp, synthetic construct
  misc_feature 1..22: note = chemically synthesized
  source 1..22: mol_type = other DNA
tggaaagaaaaaaaaagaaaag

SEQ ID NO: 68642 - DNA, 22 bp, synthetic construct
  misc_feature 1..22: note = chemically synthesized
  source 1..22: mol_type = other DNA
aggctctaagggggactgtttt

SEQ ID NO: 68643 - DNA, 22 bp, synthetic construct
  misc_feature 1..22: note = chemically synthesized
  source 1..22: mol_type = other DNA
taagggggactgtttttagatg

SEQ ID NO: 68644 - DNA, 22 bp, synthetic construct
  misc_feature 1..22: note = chemically synthesized
  source 1..22: mol_type = other DNA
agggggactgtttttagatggg

SEQ ID NO: 68645 - DNA, 22 bp, synthetic construct
  misc_feature 1..22: note = chemically synthesized
  source 1..22: mol_type = other DNA
tttttagatgggagggagatga

SEQ ID NO: 68646 - DNA, 22 bp, synthetic construct
  misc_feature 1..22: note = chemically synthesized
  source 1..22: mol_type = other DNA
ttagatgggagggagatgacac

SEQ ID NO: 68647 - DNA, 22 bp, synthetic construct
  misc_feature 1..22: note = chemically synthesized
  source 1..22: mol_type = other DNA
tagatgggagggagatgacact

SEQ ID NO: 68648 - DNA, 22 bp, synthetic construct
  misc_feature 1..22: note = chemically synthesized
  source 1..22: mol_type = other DNA
agatgggagggagatgacactt

SEQ ID NO: 68649 - DNA, 22 bp, synthetic construct
  misc_feature 1..22: note = chemically synthesized
  source 1..22: mol_type = other DNA
gatgggagggagatgacactta

SEQ ID NO: 68650 - DNA, 22 bp, synthetic construct
  misc_feature 1..22: note = chemically synthesized
  source 1..22: mol_type = other DNA
acccatcttgtaaatggtatct

SEQ ID NO: 68651 - DNA, 22 bp, synthetic construct
  misc_feature 1..22: note = chemically synthesized
  source 1..22: mol_type = other DNA
cccatcttgtaaatggtatctg

SEQ ID NO: 68652 - DNA, 22 bp, synthetic construct
  misc_feature 1..22: note = chemically synthesized
  source 1..22: mol_type = other DNA
gtaaatggtatctgaagagcag

SEQ ID NO: 68653 - DNA, 22 bp, synthetic construct
  misc_feature 1..22: note = chemically synthesized
  source 1..22: mol_type = other DNA
taaatggtatctgaagagcagg

SEQ ID NO: 68654 - DNA, 22 bp, synthetic construct
  misc_feature 1..22: note = chemically synthesized
  source 1..22: mol_type = other DNA
aagagcagggcatgcaccctga

SEQ ID NO: 68655 - DNA, 22 bp, synthetic construct
  misc_feature 1..22: note = chemically synthesized
  source 1..22: mol_type = other DNA
agaccagattcaaagccagttg

SEQ ID NO: 68656 - DNA, 22 bp, synthetic construct
  misc_feature 1..22: note = chemically synthesized
  source 1..22: mol_type = other DNA
aaagccagttgtttatttttgt

SEQ ID NO: 68657 - DNA, 22 bp, synthetic construct
  misc_feature 1..22: note = chemically synthesized
  source 1..22: mol_type = other DNA
tttatttttgttaactcctagg

SEQ ID NO: 68658 - DNA, 22 bp, synthetic construct
  misc_feature 1..22: note = chemically synthesized
  source 1..22: mol_type = other DNA
atttttgttaactcctaggtaa

SEQ ID NO: 68659 - DNA, 22 bp, synthetic construct
  misc_feature 1..22: note = chemically synthesized
  source 1..22: mol_type = other DNA
tttttgttaactcctaggtaat

SEQ ID NO: 68660 - DNA, 22 bp, synthetic construct
  misc_feature 1..22: note = chemically synthesized
  source 1..22: mol_type = other DNA
ttgttaactcctaggtaatcct

SEQ ID NO: 68661 - DNA, 22 bp, synthetic construct
  misc_feature 1..22: note = chemically synthesized
  source 1..22: mol_type = other DNA
tgttaactcctaggtaatccta

SEQ ID NO: 68662 - DNA, 22 bp, synthetic construct
  misc_feature 1..22: note = chemically synthesized
  source 1..22: mol_type = other DNA
gttaactcctaggtaatcctag

SEQ ID NO: 68663 - DNA, 22 bp, synthetic construct
  misc_feature 1..22: note = chemically synthesized
  source 1..22: mol_type = other DNA
ttaactcctaggtaatcctagg

SEQ ID NO: 68664 - DNA, 22 bp, synthetic construct
  misc_feature 1..22: note = chemically synthesized
  source 1..22: mol_type = other DNA
actcctaggtaatcctaggtaa

SEQ ID NO: 68665 - DNA, 22 bp, synthetic construct
  misc_feature 1..22: note = chemically synthesized
  source 1..22: mol_type = other DNA
ctaggtaatcctaggtaacaaa

SEQ ID NO: 68666 - DNA, 22 bp, synthetic construct
  misc_feature 1..22: note = chemically synthesized
  source 1..22: mol_type = other DNA
ggtaatcctaggtaacaaagag

SEQ ID NO: 68667 - DNA, 22 bp, synthetic construct
  misc_feature 1..22: note = chemically synthesized
  source 1..22: mol_type = other DNA
ggtaacaaagagttattgtgtg

SEQ ID NO: 68668 - DNA, 22 bp, synthetic construct
  misc_feature 1..22: note = chemically synthesized
  source 1..22: mol_type = other DNA
ttgtgtgaatttcataagccct

SEQ ID NO: 68669 - DNA, 22 bp, synthetic construct
  misc_feature 1..22: note = chemically synthesized
  source 1..22: mol_type = other DNA
tgtgaatttcataagccctcag

SEQ ID NO: 68670 - DNA, 22 bp, synthetic construct
  misc_feature 1..22: note = chemically synthesized
  source 1..22: mol_type = other DNA
cataagccctcaggtcctgagg

SEQ ID NO: 68671 - DNA, 22 bp, synthetic construct
  misc_feature 1..22: note = chemically synthesized
  source 1..22: mol_type = other DNA
ataagccctcaggtcctgaggg

SEQ ID NO: 68672 - DNA, 22 bp, synthetic construct
  misc_feature 1..22: note = chemically synthesized
  source 1..22: mol_type = other DNA
aggtcctgagggctgggtggtt

SEQ ID NO: 68673 - DNA, 22 bp, synthetic construct
  misc_feature 1..22: note = chemically synthesized
  source 1..22: mol_type = other DNA
agggctgggtggttcaggggtt

SEQ ID NO: 68674 - DNA, 22 bp, synthetic construct
  misc_feature 1..22: note = chemically synthesized
  source 1..22: mol_type = other DNA
ggtggttcaggggttaaaagca

SEQ ID NO: 68675 - DNA, 22 bp, synthetic construct
  misc_feature 1..22: note = chemically synthesized
  source 1..22: mol_type = other DNA
aggggttaaaagcacctcatct

SEQ ID NO: 68676 - DNA, 22 bp, synthetic construct
  misc_feature 1..22: note = chemically synthesized
  source 1..22: mol_type = other DNA
aaagcacctcatctgctccctt

SEQ ID NO: 68677 - DNA, 22 bp, synthetic construct
  misc_feature 1..22: note = chemically synthesized
  source 1..22: mol_type = other DNA
atctgctcccttcccccaagct

SEQ ID NO: 68678 - DNA, 22 bp, synthetic construct
  misc_feature 1..22: note = chemically synthesized
  source 1..22: mol_type = other DNA
ctcccttcccccaagctgggcc

SEQ ID NO: 68679 - DNA, 22 bp, synthetic construct
  misc_feature 1..22: note = chemically synthesized
  source 1..22: mol_type = other DNA
ccttcccccaagctgggcctaa

SEQ ID NO: 68680 - DNA, 22 bp, synthetic construct
  misc_feature 1..22: note = chemically synthesized
  source 1..22: mol_type = other DNA
cccccaagctgggcctaagcct

SEQ ID NO: 68681 - DNA, 22 bp, synthetic construct
  misc_feature 1..22: note = chemically synthesized
  source 1..22: mol_type = other DNA
ccccaagctgggcctaagcctg

SEQ ID NO: 68682 - DNA, 22 bp, synthetic construct
  misc_feature 1..22: note = chemically synthesized
  source 1..22: mol_type = other DNA
ggcctaagcctgggttaggtca

SEQ ID NO: 68683 - DNA, 22 bp, synthetic construct
  misc_feature 1..22: note = chemically synthesized
  source 1..22: mol_type = other DNA
agcctgggttaggtcacagatt

SEQ ID NO: 68684 - DNA, 22 bp, synthetic construct
  misc_feature 1..22: note = chemically synthesized
  source 1..22: mol_type = other DNA
ggttaggtcacagattgcagaa

SEQ ID NO: 68685 - DNA, 22 bp, synthetic construct
  misc_feature 1..22: note = chemically synthesized
  source 1..22: mol_type = other DNA
ggtcacagattgcagaaggttt

SEQ ID NO: 68686 - DNA, 22 bp, synthetic construct
  misc_feature 1..22: note = chemically synthesized
  source 1..22: mol_type = other DNA
cagaaggtttaggaggttgggc

SEQ ID NO: 68687 - DNA, 22 bp, synthetic construct
  misc_feature 1..22: note = chemically synthesized
  source 1..22: mol_type = other DNA
aggaggttgggctcacggtttc

SEQ ID NO: 68688 - DNA, 22 bp, synthetic construct
  misc_feature 1..22: note = chemically synthesized
  source 1..22: mol_type = other DNA
ggaggttgggctcacggtttct

SEQ ID NO: 68689 - DNA, 22 bp, synthetic construct
  misc_feature 1..22: note = chemically synthesized
  source 1..22: mol_type = other DNA
ggctcacggtttctagtccctg

SEQ ID NO: 68690 - DNA, 22 bp, synthetic construct
  misc_feature 1..22: note = chemically synthesized
  source 1..22: mol_type = other DNA
acggtttctagtccctgcatgc

SEQ ID NO: 68691 - DNA, 22 bp, synthetic construct
  misc_feature 1..22: note = chemically synthesized
  source 1..22: mol_type = other DNA
ctagtccctgcatgctggctgg

SEQ ID NO: 68692 - DNA, 22 bp, synthetic construct
  misc_feature 1..22: note = chemically synthesized
  source 1..22: mol_type = other DNA
tagtccctgcatgctggctggg

SEQ ID NO: 68693 - DNA, 22 bp, synthetic construct
  misc_feature 1..22: note = chemically synthesized
  source 1..22: mol_type = other DNA
gtccctgcatgctggctgggtg

SEQ ID NO: 68694 - DNA, 22 bp, synthetic construct
  misc_feature 1..22: note = chemically synthesized
  source 1..22: mol_type = other DNA
catgctggctgggtggggagag

SEQ ID NO: 68695 - DNA, 22 bp, synthetic construct
  misc_feature 1..22: note = chemically synthesized
  source 1..22: mol_type = other DNA
gctgggtggggagagctctcct

SEQ ID NO: 68696 - DNA, 22 bp, synthetic construct
  misc_feature 1..22: note = chemically synthesized
  source 1..22: mol_type = other DNA
ggtggggagagctctcctgttg

SEQ ID NO: 68697 - DNA, 22 bp, synthetic construct
  misc_feature 1..22: note = chemically synthesized
  source 1..22: mol_type = other DNA
tcctgttgctgggggcatctgg

SEQ ID NO: 68698 - DNA, 22 bp, synthetic construct
  misc_feature 1..22: note = chemically synthesized
  source 1..22: mol_type = other DNA
ctgttgctgggggcatctgggg

SEQ ID NO: 68699 - DNA, 22 bp, synthetic construct
  misc_feature 1..22: note = chemically synthesized
  source 1..22: mol_type = other DNA
ttgctgggggcatctggggcct

SEQ ID NO: 68700 - DNA, 22 bp, synthetic construct
  misc_feature 1..22: note = chemically synthesized
  source 1..22: mol_type = other DNA
ctgggggcatctggggcctgca

SEQ ID NO: 68701 - DNA, 22 bp, synthetic construct
  misc_feature 1..22: note = chemically synthesized
  source 1..22: mol_type = other DNA
ggggcatctggggcctgcatgg

SEQ ID NO: 68702 - DNA, 22 bp, synthetic construct
  misc_feature 1..22: note = chemically synthesized
  source 1..22: mol_type = other DNA
gggcctgcatggggctgtggaa

SEQ ID NO: 68703 - DNA, 22 bp, synthetic construct
  misc_feature 1..22: note = chemically synthesized
  source 1..22: mol_type = other DNA
catggggctgtggaaacggagc

SEQ ID NO: 68704 - DNA, 22 bp, synthetic construct
  misc_feature 1..22: note = chemically synthesized
  source 1..22: mol_type = other DNA
tggaaacggagccacttttgga

SEQ ID NO: 68705 - DNA, 22 bp, synthetic construct
  misc_feature 1..22: note = chemically synthesized
  source 1..22: mol_type = other DNA
ttggagggaagggatagaaggg

SEQ ID NO: 68706 - DNA, 22 bp, synthetic construct
  misc_feature 1..22: note = chemically synthesized
  source 1..22: mol_type = other DNA
tggagggaagggatagaaggga

SEQ ID NO: 68707 - DNA, 22 bp, synthetic construct
  misc_feature 1..22: note = chemically synthesized
  source 1..22: mol_type = other DNA
ggagggaagggatagaagggag

SEQ ID NO: 68708 - DNA, 22 bp, synthetic construct
  misc_feature 1..22: note = chemically synthesized
  source 1..22: mol_type = other DNA
gagggaagggatagaagggagt

SEQ ID NO: 68709 - DNA, 22 bp, synthetic construct
  misc_feature 1..22: note = chemically synthesized
  source 1..22: mol_type = other DNA
agcagttcagaggagggtggag

SEQ ID NO: 68710 - DNA, 22 bp, synthetic construct
  misc_feature 1..22: note = chemically synthesized
  source 1..22: mol_type = other DNA
agaggagggtggagttgagagg

SEQ ID NO: 68711 - DNA, 22 bp, synthetic construct
  misc_feature 1..22: note = chemically synthesized
  source 1..22: mol_type = other DNA
agaggccaagggctgttgccag

SEQ ID NO: 68712 - DNA, 22 bp, synthetic construct
  misc_feature 1..22: note = chemically synthesized
  source 1..22: mol_type = other DNA
ttgccagggaaacatagttctc

SEQ ID NO: 68713 - DNA, 22 bp, synthetic construct
  misc_feature 1..22: note = chemically synthesized
  source 1..22: mol_type = other DNA
ccagggaaacatagttctcggt

SEQ ID NO: 68714 - DNA, 22 bp, synthetic construct
  misc_feature 1..22: note = chemically synthesized
  source 1..22: mol_type = other DNA
tcggtcttcagcctggtcttcc

SEQ ID NO: 68715 - DNA, 22 bp, synthetic construct
  misc_feature 1..22: note = chemically synthesized
  source 1..22: mol_type = other DNA
ggtcttcagcctggtcttcctg

SEQ ID NO: 68716 - DNA, 22 bp, synthetic construct
  misc_feature 1..22: note = chemically synthesized
  source 1..22: mol_type = other DNA
cagcctggtcttcctgagggct

SEQ ID NO: 68717 - DNA, 22 bp, synthetic construct
  misc_feature 1..22: note = chemically synthesized
  source 1..22: mol_type = other DNA
agcctggtcttcctgagggctg

SEQ ID NO: 68718 - DNA, 22 bp, synthetic construct
  misc_feature 1..22: note = chemically synthesized
  source 1..22: mol_type = other DNA
gtcttcctgagggctgggagtt

SEQ ID NO: 68719 - DNA, 22 bp, synthetic construct
  misc_feature 1..22: note = chemically synthesized
  source 1..22: mol_type = other DNA
cctgagggctgggagtttgatt

SEQ ID NO: 68720 - DNA, 22 bp, synthetic construct
  misc_feature 1..22: note = chemically synthesized
  source 1..22: mol_type = other DNA
ctgagggctgggagtttgattt

SEQ ID NO: 68721 - DNA, 22 bp, synthetic construct
  misc_feature 1..22: note = chemically synthesized
  source 1..22: mol_type = other DNA
agggctgggagtttgatttgac

SEQ ID NO: 68722 - DNA, 22 bp, synthetic construct
  misc_feature 1..22: note = chemically synthesized
  source 1..22: mol_type = other DNA
ggagtttgatttgactggtagg

SEQ ID NO: 68723 - DNA, 22 bp, synthetic construct
  misc_feature 1..22: note = chemically synthesized
  source 1..22: mol_type = other DNA
gatttgactggtaggaaagtct

SEQ ID NO: 68724 - DNA, 22 bp, synthetic construct
  misc_feature 1..22: note = chemically synthesized
  source 1..22: mol_type = other DNA
atttgactggtaggaaagtctg

SEQ ID NO: 68725 - DNA, 22 bp, synthetic construct
  misc_feature 1..22: note = chemically synthesized
  source 1..22: mol_type = other DNA
gactggtaggaaagtctgagct

SEQ ID NO: 68726 - DNA, 22 bp, synthetic construct
  misc_feature 1..22: note = chemically synthesized
  source 1..22: mol_type = other DNA
actggtaggaaagtctgagctt

SEQ ID NO: 68727 - DNA, 22 bp, synthetic construct
  misc_feature 1..22: note = chemically synthesized
  source 1..22: mol_type = other DNA
gtaggaaagtctgagcttgata

SEQ ID NO: 68728 - DNA, 22 bp, synthetic construct
  misc_feature 1..22: note = chemically synthesized
  source 1..22: mol_type = other DNA
agcttgatagggaacccctgtc

SEQ ID NO: 68729 - DNA, 22 bp, synthetic construct
  misc_feature 1..22: note = chemically synthesized
  source 1..22: mol_type = other DNA
gatagggaacccctgtcctctc

SEQ ID NO: 68730 - DNA, 22 bp, synthetic construct
  misc_feature 1..22: note = chemically synthesized
  source 1..22: mol_type = other DNA
atagggaacccctgtcctctcc

SEQ ID NO: 68731 - DNA, 22 bp, synthetic construct
  misc_feature 1..22: note = chemically synthesized
  source 1..22: mol_type = other DNA
tcctctcccaccttcccacaaa

SEQ ID NO: 68732 - DNA, 22 bp, synthetic construct
  misc_feature 1..22: note = chemically synthesized
  source 1..22: mol_type = other DNA
tcccaccttcccacaaagggag

SEQ ID NO: 68733 - DNA, 22 bp, synthetic construct
  misc_feature 1..22: note = chemically synthesized
  source 1..22: mol_type = other DNA
ccaccttcccacaaagggaggg

SEQ ID NO: 68734 - DNA, 22 bp, synthetic construct
  misc_feature 1..22: note = chemically synthesized
  source 1..22: mol_type = other DNA
cccacaaagggagggtacatag

SEQ ID NO: 68735 - DNA, 22 bp, synthetic construct
  misc_feature 1..22: note = chemically synthesized
  source 1..22: mol_type = other DNA
ccacaaagggagggtacatagt

SEQ ID NO: 68736 - DNA, 22 bp, synthetic construct
  misc_feature 1..22: note = chemically synthesized
  source 1..22: mol_type = other DNA
gctggtgcccctgctggcagga

SEQ ID NO: 68737 - DNA, 22 bp, synthetic construct
  misc_feature 1..22: note = chemically synthesized
  source 1..22: mol_type = other DNA
ctggtgcccctgctggcaggac

SEQ ID NO: 68738 - DNA, 22 bp, synthetic construct
  misc_feature 1..22: note = chemically synthesized
  source 1..22: mol_type = other DNA
gtgcccctgctggcaggaccaa

SEQ ID NO: 68739 - DNA, 22 bp, synthetic construct
  misc_feature 1..22: note = chemically synthesized
  source 1..22: mol_type = other DNA
ctggcaggaccaatttaggagt

SEQ ID NO: 68740 - DNA, 22 bp, synthetic construct
  misc_feature 1..22: note = chemically synthesized
  source 1..22: mol_type = other DNA
gcaggaccaatttaggagtgac

SEQ ID NO: 68741 - DNA, 22 bp, synthetic construct
  misc_feature 1..22: note = chemically synthesized
  source 1..22: mol_type = other DNA
aggagtgaccagaacaaggtat

SEQ ID NO: 68742 - DNA, 22 bp, synthetic construct
  misc_feature 1..22: note = chemically synthesized
  source 1..22: mol_type = other DNA
ggagtgaccagaacaaggtatg

SEQ ID NO: 68743 - DNA, 22 bp, synthetic construct
  misc_feature 1..22: note = chemically synthesized
  source 1..22: mol_type = other DNA
tgggggtccagaaagctctaga

SEQ ID NO: 68744 - DNA, 22 bp, synthetic construct
  misc_feature 1..22: note = chemically synthesized
  source 1..22: mol_type = other DNA
tagaacaaacctgatgcccatt

SEQ ID NO: 68745 - DNA, 22 bp, synthetic construct
  misc_feature 1..22: note = chemically synthesized
  source 1..22: mol_type = other DNA
gaacaaacctgatgcccattcc

SEQ ID NO: 68746 - DNA, 22 bp, synthetic construct
  misc_feature 1..22: note = chemically synthesized
  source 1..22: mol_type = other DNA
atgcccattccacttggcggca

SEQ ID NO: 68747 - DNA, 22 bp, synthetic construct
  misc_feature 1..22: note = chemically synthesized
  source 1..22: mol_type = other DNA
cacttggcggcattaacctgct

SEQ ID NO: 68748 - DNA, 22 bp, synthetic construct
  misc_feature 1..22: note = chemically synthesized
  source 1..22: mol_type = other DNA
ggcggcattaacctgctgcccc

SEQ ID NO: 68749 - DNA, 22 bp, synthetic construct
  misc_feature 1..22: note = chemically synthesized
  source 1..22: mol_type = other DNA
gcggcattaacctgctgcccct

SEQ ID NO: 68750 - DNA, 22 bp, synthetic construct
  misc_feature 1..22: note = chemically synthesized
  source 1..22: mol_type = other DNA
acctgctgcccctggcttccag

SEQ ID NO: 68751 - DNA, 22 bp, synthetic construct
  misc_feature 1..22: note = chemically synthesized
  source 1..22: mol_type = other DNA
ctgcccctggcttccagagctc

SEQ ID NO: 68752 - DNA, 22 bp, synthetic construct
  misc_feature 1..22: note = chemically synthesized
  source 1..22: mol_type = other DNA
cccctggcttccagagctcata

SEQ ID NO: 68753 - DNA, 22 bp, synthetic construct
  misc_feature 1..22: note = chemically synthesized
  source 1..22: mol_type = other DNA
gcttccagagctcatagcactt

SEQ ID NO: 68754 - DNA, 22 bp, synthetic construct
  misc_feature 1..22: note = chemically synthesized
  source 1..22: mol_type = other DNA
ccagagctcatagcacttccct

SEQ ID NO: 68755 - DNA, 22 bp, synthetic construct
  misc_feature 1..22: note = chemically synthesized
  source 1..22: mol_type = other DNA
cagagctcatagcacttccctg

SEQ ID NO: 68756 - DNA, 22 bp, synthetic construct
  misc_feature 1..22: note = chemically synthesized
  source 1..22: mol_type = other DNA
atagcacttccctgtggccact

SEQ ID NO: 68757 - DNA, 22 bp, synthetic construct
  misc_feature 1..22: note = chemically synthesized
  source 1..22: mol_type = other DNA
ccctgtggccactctgctgtgt

SEQ ID NO: 68758 - DNA, 22 bp, synthetic construct
  misc_feature 1..22: note = chemically synthesized
  source 1..22: mol_type = other DNA
cctgtggccactctgctgtgtg

SEQ ID NO: 68759 - DNA, 22 bp, synthetic construct
  misc_feature 1..22: note = chemically synthesized
  source 1..22: mol_type = other DNA
tggccactctgctgtgtgccag

SEQ ID NO: 68760 - DNA, 22 bp, synthetic construct
  misc_feature 1..22: note = chemically synthesized
  source 1..22: mol_type = other DNA
tgctgtgtgccagtcacccctg

SEQ ID NO: 68761 - DNA, 22 bp, synthetic construct
  misc_feature 1..22: note = chemically synthesized
  source 1..22: mol_type = other DNA
ctgtgtgccagtcacccctgct

SEQ ID NO: 68762 - DNA, 22 bp, synthetic construct
  misc_feature 1..22: note = chemically synthesized
  source 1..22: mol_type = other DNA
tgtgccagtcacccctgctctt

SEQ ID NO: 68763 - DNA, 22 bp, synthetic construct
  misc_feature 1..22: note = chemically synthesized
  source 1..22: mol_type = other DNA
ctctttaactagagcctccttt

SEQ ID NO: 68764 - DNA, 22 bp, synthetic construct
  misc_feature 1..22: note = chemically synthesized
  source 1..22: mol_type = other DNA
tttaactagagcctccttttgg

SEQ ID NO: 68765 - DNA, 22 bp, synthetic construct
  misc_feature 1..22: note = chemically synthesized
  source 1..22: mol_type = other DNA
taactagagcctccttttggcc

SEQ ID NO: 68766 - DNA, 22 bp, synthetic construct
  misc_feature 1..22: note = chemically synthesized
  source 1..22: mol_type = other DNA
aactagagcctccttttggcct

SEQ ID NO: 68767 - DNA, 22 bp, synthetic construct
  misc_feature 1..22: note = chemically synthesized
  source 1..22: mol_type = other DNA
actagagcctccttttggcctg

SEQ ID NO: 68768 - DNA, 22 bp, synthetic construct
  misc_feature 1..22: note = chemically synthesized
  source 1..22: mol_type = other DNA
gagcctccttttggcctgggtt

SEQ ID NO: 68769 - DNA, 22 bp, synthetic construct
  misc_feature 1..22: note = chemically synthesized
  source 1..22: mol_type = other DNA
cttttggcctgggttaaggcct

SEQ ID NO: 68770 - DNA, 22 bp, synthetic construct
  misc_feature 1..22: note = chemically synthesized
  source 1..22: mol_type = other DNA
ttggcctgggttaaggcctgga

SEQ ID NO: 68771 - DNA, 22 bp, synthetic construct
  misc_feature 1..22: note = chemically synthesized
  source 1..22: mol_type = other DNA
tggcctgggttaaggcctggac

SEQ ID NO: 68772 - DNA, 22 bp, synthetic construct
  misc_feature 1..22: note = chemically synthesized
  source 1..22: mol_type = other DNA
ggcctgggttaaggcctggact

SEQ ID NO: 68773 - DNA, 22 bp, synthetic construct
  misc_feature 1..22: note = chemically synthesized
  source 1..22: mol_type = other DNA
gcctgggttaaggcctggactg

SEQ ID NO: 68774 - DNA, 22 bp, synthetic construct
  misc_feature 1..22: note = chemically synthesized
  source 1..22: mol_type = other DNA
ggttaaggcctggactgggacc

SEQ ID NO: 68775 - DNA, 22 bp, synthetic construct
  misc_feature 1..22: note = chemically synthesized
  source 1..22: mol_type = other DNA
aggcctggactgggaccttcct

SEQ ID NO: 68776 - DNA, 22 bp, synthetic construct
  misc_feature 1..22: note = chemically synthesized
  source 1..22: mol_type = other DNA
gactgggaccttcctctggaag

SEQ ID NO: 68777 - DNA, 22 bp, synthetic construct
  misc_feature 1..22: note = chemically synthesized
  source 1..22: mol_type = other DNA
ggaccttcctctggaagccgtt

SEQ ID NO: 68778 - DNA, 22 bp, synthetic construct
  misc_feature 1..22: note = chemically synthesized
  source 1..22: mol_type = other DNA
cctctggaagccgttcggggtg

SEQ ID NO: 68779 - DNA, 22 bp, synthetic construct
  misc_feature 1..22: note = chemically synthesized
  source 1..22: mol_type = other DNA
ctctggaagccgttcggggtgt

SEQ ID NO: 68780 - DNA, 22 bp, synthetic construct
  misc_feature 1..22: note = chemically synthesized
  source 1..22: mol_type = other DNA
tggaagccgttcggggtgtgta

SEQ ID NO: 68781 - DNA, 22 bp, synthetic construct
  misc_feature 1..22: note = chemically synthesized
  source 1..22: mol_type = other DNA
gaagccgttcggggtgtgtaat

SEQ ID NO: 68782 - DNA, 22 bp, synthetic construct
  misc_feature 1..22: note = chemically synthesized
  source 1..22: mol_type = other DNA
ggggtgtgtaatgtggttagtc

SEQ ID NO: 68783 - DNA, 22 bp, synthetic construct
  misc_feature 1..22: note = chemically synthesized
  source 1..22: mol_type = other DNA
gtcattaccctcagtaattaat

SEQ ID NO: 68784 - DNA, 22 bp, synthetic construct
  misc_feature 1..22: note = chemically synthesized
  source 1..22: mol_type = other DNA
ccctcagtaattaatcacccct

SEQ ID NO: 68785 - DNA, 22 bp, synthetic construct
  misc_feature 1..22: note = chemically synthesized
  source 1..22: mol_type = other DNA
agtaattaatcacccctggtag

SEQ ID NO: 68786 - DNA, 22 bp, synthetic construct
  misc_feature 1..22: note = chemically synthesized
  source 1..22: mol_type = other DNA
atcacccctggtagtaatgaaa

SEQ ID NO: 68787 - DNA, 22 bp, synthetic construct
  misc_feature 1..22: note = chemically synthesized
  source 1..22: mol_type = other DNA
gtagtaatgaaaactcacattc

SEQ ID NO: 68788 - DNA, 22 bp, synthetic construct
  misc_feature 1..22: note = chemically synthesized
  source 1..22: mol_type = other DNA
acattcacattcgacctgatag

SEQ ID NO: 68789 - DNA, 22 bp, synthetic construct
  misc_feature 1..22: note = chemically synthesized
  source 1..22: mol_type = other DNA
acattcgacctgatagtttaca

SEQ ID NO: 68790 - DNA, 22 bp, synthetic construct
  misc_feature 1..22: note = chemically synthesized
  source 1..22: mol_type = other DNA
gacctgatagtttacagagggc

SEQ ID NO: 68791 - DNA, 22 bp, synthetic construct
  misc_feature 1..22: note = chemically synthesized
  source 1..22: mol_type = other DNA
atagtttacagagggcttttat

SEQ ID NO: 68792 - DNA, 22 bp, synthetic construct
  misc_feature 1..22: note = chemically synthesized
  source 1..22: mol_type = other DNA
acagagggcttttatatacttc

SEQ ID NO: 68793 - DNA, 22 bp, synthetic construct
  misc_feature 1..22: note = chemically synthesized
  source 1..22: mol_type = other DNA
cagagggcttttatatacttct

SEQ ID NO: 68794 - DNA, 22 bp, synthetic construct
  misc_feature 1..22: note = chemically synthesized
  source 1..22: mol_type = other DNA
ttatatacttctgtcatttgaa

SEQ ID NO: 68795 - DNA, 22 bp, synthetic construct
  misc_feature 1..22: note = chemically synthesized
  source 1..22: mol_type = other DNA
tatatacttctgtcatttgaac

SEQ ID NO: 68796 - DNA, 22 bp, synthetic construct
  misc_feature 1..22: note = chemically synthesized
  source 1..22: mol_type = other DNA
atatacttctgtcatttgaact

SEQ ID NO: 68797 - DNA, 22 bp, synthetic construct
  misc_feature 1..22: note = chemically synthesized
  source 1..22: mol_type = other DNA
tatacttctgtcatttgaactt

SEQ ID NO: 68798 - DNA, 22 bp, synthetic construct
  misc_feature 1..22: note = chemically synthesized
  source 1..22: mol_type = other DNA
ctgtcatttgaacttcccaaca

SEQ ID NO: 68799 - DNA, 22 bp, synthetic construct
  misc_feature 1..22: note = chemically synthesized
  source 1..22: mol_type = other DNA
tgtcatttgaacttcccaacaa

SEQ ID NO: 68800 - DNA, 22 bp, synthetic construct
  misc_feature 1..22: note = chemically synthesized
  source 1..22: mol_type = other DNA
tcatttgaacttcccaacaatt

SEQ ID NO: 68801 - DNA, 22 bp, synthetic construct
  misc_feature 1..22: note = chemically synthesized
  source 1..22: mol_type = other DNA
gaacttcccaacaattcttaca

SEQ ID NO: 68802 - DNA, 22 bp, synthetic construct
  misc_feature 1..22: note = chemically synthesized
  source 1..22: mol_type = other DNA
aacttcccaacaattcttacag

SEQ ID NO: 68803 - DNA, 22 bp, synthetic construct
  misc_feature 1..22: note = chemically synthesized
  source 1..22: mol_type = other DNA
cccaacaattcttacaggtact

SEQ ID NO: 68804 - DNA, 22 bp, synthetic construct
  misc_feature 1..22: note = chemically synthesized
  source 1..22: mol_type = other DNA
ccaacaattcttacaggtactg

SEQ ID NO: 68805 - DNA, 22 bp, synthetic construct
  misc_feature 1..22: note = chemically synthesized
  source 1..22: mol_type = other DNA
ttacaggtactgtttttatgct

SEQ ID NO: 68806 - DNA, 22 bp, synthetic construct
  misc_feature 1..22: note = chemically synthesized
  source 1..22: mol_type = other DNA
acaggtactgtttttatgctca

SEQ ID NO: 68807 - DNA, 22 bp, synthetic construct
  misc_feature 1..22: note = chemically synthesized
  source 1..22: mol_type = other DNA
caggtactgtttttatgctcat

SEQ ID NO: 68808 - DNA, 22 bp, synthetic construct
  misc_feature 1..22: note = chemically synthesized
  source 1..22: mol_type = other DNA
tttttatgctcattttacagat

SEQ ID NO: 68809 - DNA, 22 bp, synthetic construct
  misc_feature 1..22: note = chemically synthesized
  source 1..22: mol_type = other DNA
ttatgctcattttacagatagg

SEQ ID NO: 68810 - DNA, 22 bp, synthetic construct
  misc_feature 1..22: note = chemically synthesized
  source 1..22: mol_type = other DNA
tatgctcattttacagatagga

SEQ ID NO: 68811 - DNA, 22 bp, synthetic construct
  misc_feature 1..22: note = chemically synthesized
  source 1..22: mol_type = other DNA
atgctcattttacagataggaa

SEQ ID NO: 68812 - DNA, 22 bp, synthetic construct
  misc_feature 1..22: note = chemically synthesized
  source 1..22: mol_type = other DNA
tgctcattttacagataggaat

SEQ ID NO: 68813 - DNA, 22 bp, synthetic construct
  misc_feature 1..22: note = chemically synthesized
  source 1..22: mol_type = other DNA
attttacagataggaattccaa

SEQ ID NO: 68814 - DNA, 22 bp, synthetic construct
  misc_feature 1..22: note = chemically synthesized
  source 1..22: mol_type = other DNA
tacagataggaattccaagact

SEQ ID NO: 68815 - DNA, 22 bp, synthetic construct
  misc_feature 1..22: note = chemically synthesized
  source 1..22: mol_type = other DNA
acagataggaattccaagactc

SEQ ID NO: 68816 - DNA, 22 bp, synthetic construct
  misc_feature 1..22: note = chemically synthesized
  source 1..22: mol_type = other DNA
cagataggaattccaagactca

SEQ ID NO: 68817 - DNA, 22 bp, synthetic construct
  misc_feature 1..22: note = chemically synthesized
  source 1..22: mol_type = other DNA
caagactcagagaaatcaaatg

SEQ ID NO: 68818 - DNA, 22 bp, synthetic construct
  misc_feature 1..22: note = chemically synthesized
  source 1..22: mol_type = other DNA
agagaaatcaaatgactatccc

SEQ ID NO: 68819 - DNA, 22 bp, synthetic construct
  misc_feature 1..22: note = chemically synthesized
  source 1..22: mol_type = other DNA
tcccagagttacaatctagtgg

SEQ ID NO: 68820 - DNA, 22 bp, synthetic construct
  misc_feature 1..22: note = chemically synthesized
  source 1..22: mol_type = other DNA
caatctagtggataatagagct

SEQ ID NO: 68821 - DNA, 22 bp, synthetic construct
  misc_feature 1..22: note = chemically synthesized
  source 1..22: mol_type = other DNA
gtggataatagagctaggcctc

SEQ ID NO: 68822 - DNA, 22 bp, synthetic construct
  misc_feature 1..22: note = chemically synthesized
  source 1..22: mol_type = other DNA
ggcctccagtctcagacctcct

SEQ ID NO: 68823 - DNA, 22 bp, synthetic construct
  misc_feature 1..22: note = chemically synthesized
  source 1..22: mol_type = other DNA
cagtctcagacctccttgttct

SEQ ID NO: 68824 - DNA, 22 bp, synthetic construct
  misc_feature 1..22: note = chemically synthesized
  source 1..22: mol_type = other DNA
agacctccttgttcttctgaat

SEQ ID NO: 68825 - DNA, 22 bp, synthetic construct
  misc_feature 1..22: note = chemically synthesized
  source 1..22: mol_type = other DNA
cttgttcttctgaatcttgagg

SEQ ID NO: 68826 - DNA, 22 bp, synthetic construct
  misc_feature 1..22: note = chemically synthesized
  source 1..22: mol_type = other DNA
gttcttctgaatcttgaggctt

SEQ ID NO: 68827 - DNA, 22 bp, synthetic construct
  misc_feature 1..22: note = chemically synthesized
  source 1..22: mol_type = other DNA
ttcttctgaatcttgaggctta

SEQ ID NO: 68828 - DNA, 22 bp, synthetic construct
  misc_feature 1..22: note = chemically synthesized
  source 1..22: mol_type = other DNA
ttctgaatcttgaggcttagat

SEQ ID NO: 68829 - DNA, 22 bp, synthetic construct
  misc_feature 1..22: note = chemically synthesized
  source 1..22: mol_type = other DNA
ctgaatcttgaggcttagatca

SEQ ID NO: 68830 - DNA, 22 bp, synthetic construct
  misc_feature 1..22: note = chemically synthesized
  source 1..22: mol_type = other DNA
tgaatcttgaggcttagatcac

SEQ ID NO: 68831 - DNA, 22 bp, synthetic construct
  misc_feature 1..22: note = chemically synthesized
  source 1..22: mol_type = other DNA
aatcttgaggcttagatcacat

SEQ ID NO: 68832 - DNA, 22 bp, synthetic construct
  misc_feature 1..22: note = chemically synthesized
  source 1..22: mol_type = other DNA
gaggcttagatcacatgacttt

SEQ ID NO: 68833 - DNA, 22 bp, synthetic construct
  misc_feature 1..22: note = chemically synthesized
  source 1..22: mol_type = other DNA
aggcttagatcacatgactttt

SEQ ID NO: 68834 - DNA, 22 bp, synthetic construct
  misc_feature 1..22: note = chemically synthesized
  source 1..22: mol_type = other DNA
agatcacatgactttttcacat

SEQ ID NO: 68835 - DNA, 22 bp, synthetic construct
  misc_feature 1..22: note = chemically synthesized
  source 1..22: mol_type = other DNA
gatcacatgactttttcacatt

SEQ ID NO: 68836 - DNA, 22 bp, synthetic construct
  misc_feature 1..22: note = chemically synthesized
  source 1..22: mol_type = other DNA
tttcacattggtgacatactag

SEQ ID NO: 68837 - DNA, 22 bp, synthetic construct
  misc_feature 1..22: note = chemically synthesized
  source 1..22: mol_type = other DNA
ttcacattggtgacatactaga

SEQ ID NO: 68838 - DNA, 22 bp, synthetic construct
  misc_feature 1..22: note = chemically synthesized
  source 1..22: mol_type = other DNA
tcacattggtgacatactagaa

SEQ ID NO: 68839 - DNA, 22 bp, synthetic construct
  misc_feature 1..22: note = chemically synthesized
  source 1..22: mol_type = other DNA
cacattggtgacatactagaaa

SEQ ID NO: 68840 - DNA, 22 bp, synthetic construct
  misc_feature 1..22: note = chemically synthesized
  source 1..22: mol_type = other DNA
acattggtgacatactagaaat

SEQ ID NO: 68841 - DNA, 22 bp, synthetic construct
  misc_feature 1..22: note = chemically synthesized
  source 1..22: mol_type = other DNA
gtgacatactagaaatgggggt

SEQ ID NO: 68842 - DNA, 22 bp, synthetic construct
  misc_feature 1..22: note = chemically synthesized
  source 1..22: mol_type = other DNA
gaaatgggggtcattccttccc

SEQ ID NO: 68843 - DNA, 22 bp, synthetic construct
  misc_feature 1..22: note = chemically synthesized
  source 1..22: mol_type = other DNA
cttcccataaagtaaaatgaaa

SEQ ID NO: 68844 - DNA, 22 bp, synthetic construct
  misc_feature 1..22: note = chemically synthesized
  source 1..22: mol_type = other DNA
cccataaagtaaaatgaaataa

SEQ ID NO: 68845 - DNA, 22 bp, synthetic construct
  misc_feature 1..22: note = chemically synthesized
  source 1..22: mol_type = other DNA
ccataaagtaaaatgaaataaa

SEQ ID NO: 68846 - DNA, 22 bp, synthetic construct
  misc_feature 1..22: note = chemically synthesized
  source 1..22: mol_type = other DNA
atagctgattttaacccttttg

SEQ ID NO: 68847 - DNA, 22 bp, synthetic construct
  misc_feature 1..22: note = chemically synthesized
  source 1..22: mol_type = other DNA
attttaacccttttgatgtctc

SEQ ID NO: 68848 - DNA, 22 bp, synthetic construct
  misc_feature 1..22: note = chemically synthesized
  source 1..22: mol_type = other DNA
taacccttttgatgtctcaagt

SEQ ID NO: 68849 - DNA, 22 bp, synthetic construct
  misc_feature 1..22: note = chemically synthesized
  source 1..22: mol_type = other DNA
aacccttttgatgtctcaagtt

SEQ ID NO: 68850 - DNA, 22 bp, synthetic construct
  misc_feature 1..22: note = chemically synthesized
  source 1..22: mol_type = other DNA
acccttttgatgtctcaagttc

SEQ ID NO: 68851 - DNA, 22 bp, synthetic construct
  misc_feature 1..22: note = chemically synthesized
  source 1..22: mol_type = other DNA
ttgatgtctcaagttcctatgc

SEQ ID NO: 68852 - DNA, 22 bp, synthetic construct
  misc_feature 1..22: note = chemically synthesized
  source 1..22: mol_type = other DNA
tgatgtctcaagttcctatgct

SEQ ID NO: 68853 - DNA, 22 bp, synthetic construct
  misc_feature 1..22: note = chemically synthesized
  source 1..22: mol_type = other DNA
gatgtctcaagttcctatgctt

SEQ ID NO: 68854 - DNA, 22 bp, synthetic construct
  misc_feature 1..22: note = chemically synthesized
  source 1..22: mol_type = other DNA
atgtctcaagttcctatgctta

SEQ ID NO: 68855 - DNA, 22 bp, synthetic construct
  misc_feature 1..22: note = chemically synthesized
  source 1..22: mol_type = other DNA
aagttcctatgcttaggggcca

SEQ ID NO: 68856 - DNA, 22 bp, synthetic construct
  misc_feature 1..22: note = chemically synthesized
  source 1..22: mol_type = other DNA
ctatgcttaggggccaggtgtc

SEQ ID NO: 68857 - DNA, 22 bp, synthetic construct
  misc_feature 1..22: note = chemically synthesized
  source 1..22: mol_type = other DNA
tgcttaggggccaggtgtcagt

SEQ ID NO: 68858 - DNA, 22 bp, synthetic construct
  misc_feature 1..22: note = chemically synthesized
  source 1..22: mol_type = other DNA
aggggccaggtgtcagtttatt

SEQ ID NO: 68859 - DNA, 22 bp, synthetic construct
  misc_feature 1..22: note = chemically synthesized
  source 1..22: mol_type = other DNA
ggggccaggtgtcagtttattg

SEQ ID NO: 68860 - DNA, 22 bp, synthetic construct
  misc_feature 1..22: note = chemically synthesized
  source 1..22: mol_type = other DNA
attgctctaaatcaaaacaatc

SEQ ID NO: 68861 - DNA, 22 bp, synthetic construct
  misc_feature 1..22: note = chemically synthesized
  source 1..22: mol_type = other DNA
ttgctctaaatcaaaacaatcc

SEQ ID NO: 68862 - DNA, 22 bp, synthetic construct
  misc_feature 1..22: note = chemically synthesized
  source 1..22: mol_type = other DNA
ctctaaatcaaaacaatccccg

SEQ ID NO: 68863 - DNA, 22 bp, synthetic construct
  misc_feature 1..22: note = chemically synthesized
  source 1..22: mol_type = other DNA
taaatcaaaacaatccccgtaa

SEQ ID NO: 68864 - DNA, 22 bp, synthetic construct
  misc_feature 1..22: note = chemically synthesized
  source 1..22: mol_type = other DNA
aatcaaaacaatccccgtaaat

SEQ ID NO: 68865 - DNA, 22 bp, synthetic construct
  misc_feature 1..22: note = chemically synthesized
  source 1..22: mol_type = other DNA
tcaaattgagaagttgattttc

SEQ ID NO: 68866 - DNA, 22 bp, synthetic construct
  misc_feature 1..22: note = chemically synthesized
  source 1..22: mol_type = other DNA
aaattgagaagttgattttcat

SEQ ID NO: 68867 - DNA, 22 bp, synthetic construct
  misc_feature 1..22: note = chemically synthesized
  source 1..22: mol_type = other DNA
agaagttgattttcatcagagt

SEQ ID NO: 68868 - DNA, 22 bp, synthetic construct
  misc_feature 1..22: note = chemically synthesized
  source 1..22: mol_type = other DNA
attttcatcagagtaaatgaag

SEQ ID NO: 68869 - DNA, 22 bp, synthetic construct
  misc_feature 1..22: note = chemically synthesized
  source 1..22: mol_type = other DNA
tcatcagagtaaatgaagaata

SEQ ID NO: 68870 - DNA, 22 bp, synthetic construct
  misc_feature 1..22: note = chemically synthesized
  source 1..22: mol_type = other DNA
catcagagtaaatgaagaatat

SEQ ID NO: 68871 - DNA, 22 bp, synthetic construct
  misc_feature 1..22: note = chemically synthesized
  source 1..22: mol_type = other DNA
atcagagtaaatgaagaatatt

SEQ ID NO: 68872 - DNA, 22 bp, synthetic construct
  misc_feature 1..22: note = chemically synthesized
  source 1..22: mol_type = other DNA
ttatattttacacatcaataaa

SEQ ID NO: 68873 - DNA, 22 bp, synthetic construct
  misc_feature 1..22: note = chemically synthesized
  source 1..22: mol_type = other DNA
tattttacacatcaataaatca

SEQ ID NO: 68874 - DNA, 22 bp, synthetic construct
  misc_feature 1..22: note = chemically synthesized
  source 1..22: mol_type = other DNA
tacacatcaataaatcaatgta

SEQ ID NO: 68875 - DNA, 22 bp, synthetic construct
  misc_feature 1..22: note = chemically synthesized
  source 1..22: mol_type = other DNA
acacatcaataaatcaatgtag

SEQ ID NO: 68876 - DNA, 22 bp, synthetic construct
  misc_feature 1..22: note = chemically synthesized
  source 1..22: mol_type = other DNA
cacatcaataaatcaatgtagc

SEQ ID NO: 68877 - DNA, 22 bp, synthetic construct
  misc_feature 1..22: note = chemically synthesized
  source 1..22: mol_type = other DNA
attttgccacacaggaaatcaa

SEQ ID NO: 68878 - DNA, 22 bp, synthetic construct
  misc_feature 1..22: note = chemically synthesized
  source 1..22: mol_type = other DNA
tgccacacaggaaatcaattcc

SEQ ID NO: 68879 - DNA, 22 bp, synthetic construct
  misc_feature 1..22: note = chemically synthesized
  source 1..22: mol_type = other DNA
gccacacaggaaatcaattcca

SEQ ID NO: 68880 - DNA, 22 bp, synthetic construct
  misc_feature 1..22: note = chemically synthesized
  source 1..22: mol_type = other DNA
ccacacaggaaatcaattccag

SEQ ID NO: 68881 - DNA, 22 bp, synthetic construct
  misc_feature 1..22: note = chemically synthesized
  source 1..22: mol_type = other DNA
cagtctttctaaatcatcaaag

SEQ ID NO: 68882 - DNA, 22 bp, synthetic construct
  misc_feature 1..22: note = chemically synthesized
  source 1..22: mol_type = other DNA
tctaaatcatcaaagatgttat

SEQ ID NO: 68883 - DNA, 22 bp, synthetic construct
  misc_feature 1..22: note = chemically synthesized
  source 1..22: mol_type = other DNA
ctaaatcatcaaagatgttatg

SEQ ID NO: 68884 - DNA, 22 bp, synthetic construct
  misc_feature 1..22: note = chemically synthesized
  source 1..22: mol_type = other DNA
taaatcatcaaagatgttatga

SEQ ID NO: 68885 - DNA, 22 bp, synthetic construct
  misc_feature 1..22: note = chemically synthesized
  source 1..22: mol_type = other DNA
aatcatcaaagatgttatgaac

SEQ ID NO: 68886 - DNA, 22 bp, synthetic construct
  misc_feature 1..22: note = chemically synthesized
  source 1..22: mol_type = other DNA
tgaacaaagtaatttcacaaat

SEQ ID NO: 68887 - DNA, 22 bp, synthetic construct
  misc_feature 1..22: note = chemically synthesized
  source 1..22: mol_type = other DNA
cacaaattatggcaagtaacac

SEQ ID NO: 68888 - DNA, 22 bp, synthetic construct
  misc_feature 1..22: note = chemically synthesized
  source 1..22: mol_type = other DNA
acaaattatggcaagtaacaca

SEQ ID NO: 68889 - DNA, 22 bp, synthetic construct
  misc_feature 1..22: note = chemically synthesized
  source 1..22: mol_type = other DNA
tggcaagtaacacatttattga

SEQ ID NO: 68890 - DNA, 22 bp, synthetic construct
  misc_feature 1..22: note = chemically synthesized
  source 1..22: mol_type = other DNA
attgatgactgcagtttaggaa

SEQ ID NO: 68891 - DNA, 22 bp, synthetic construct
  misc_feature 1..22: note = chemically synthesized
  source 1..22: mol_type = other DNA
ttgatgactgcagtttaggaat

SEQ ID NO: 68892 - DNA, 22 bp, synthetic construct
  misc_feature 1..22: note = chemically synthesized
  source 1..22: mol_type = other DNA
atgactgcagtttaggaattta

SEQ ID NO: 68893 - DNA, 22 bp, synthetic construct
  misc_feature 1..22: note = chemically synthesized
  source 1..22: mol_type = other DNA
cagtttaggaatttagaatctg

SEQ ID NO: 68894 - DNA, 22 bp, synthetic construct
  misc_feature 1..22: note = chemically synthesized
  source 1..22: mol_type = other DNA
aggaatttagaatctgtgagca

SEQ ID NO: 68895 - DNA, 22 bp, synthetic construct
  misc_feature 1..22: note = chemically synthesized
  source 1..22: mol_type = other DNA
ggaatttagaatctgtgagcac

SEQ ID NO: 68896 - DNA, 22 bp, synthetic construct
  misc_feature 1..22: note = chemically synthesized
  source 1..22: mol_type = other DNA
agaatctgtgagcactgtaata

SEQ ID NO: 68897 - DNA, 22 bp, synthetic construct
  misc_feature 1..22: note = chemically synthesized
  source 1..22: mol_type = other DNA
gaatctgtgagcactgtaatat

SEQ ID NO: 68898 - DNA, 22 bp, synthetic construct
  misc_feature 1..22: note = chemically synthesized
  source 1..22: mol_type = other DNA
tgagcactgtaatataatatgg

SEQ ID NO: 68899 - DNA, 22 bp, synthetic construct
  misc_feature 1..22: note = chemically synthesized
  source 1..22: mol_type = other DNA
taatataatatggtacaccggc

SEQ ID NO: 68900 - DNA, 22 bp, synthetic construct
  misc_feature 1..22: note = chemically synthesized
  source 1..22: mol_type = other DNA
agtgaaatacagattatatggt

SEQ ID NO: 68901 - DNA, 22 bp, synthetic construct
  misc_feature 1..22: note = chemically synthesized
  source 1..22: mol_type = other DNA
tatggtgaaattgtaatgcatc

SEQ ID NO: 68902 - DNA, 22 bp, synthetic construct
  misc_feature 1..22: note = chemically synthesized
  source 1..22: mol_type = other DNA
taatgcatcatttgctattagt

SEQ ID NO: 68903 - DNA, 22 bp, synthetic construct
  misc_feature 1..22: note = chemically synthesized
  source 1..22: mol_type = other DNA
gctattagtggactggtaataa

SEQ ID NO: 68904 - DNA, 22 bp, synthetic construct
  misc_feature 1..22: note = chemically synthesized
  source 1..22: mol_type = other DNA
ctattagtggactggtaataat

SEQ ID NO: 68905 - DNA, 22 bp, synthetic construct
  misc_feature 1..22: note = chemically synthesized
  source 1..22: mol_type = other DNA
ttagtggactggtaataattac

SEQ ID NO: 68906 - DNA, 22 bp, synthetic construct
  misc_feature 1..22: note = chemically synthesized
  source 1..22: mol_type = other DNA
gtggactggtaataattaccag

SEQ ID NO: 68907 - DNA, 22 bp, synthetic construct
  misc_feature 1..22: note = chemically synthesized
  source 1..22: mol_type = other DNA
gtaataattaccagtttcaaag

SEQ ID NO: 68908 - DNA, 22 bp, synthetic construct
  misc_feature 1..22: note = chemically synthesized
  source 1..22: mol_type = other DNA
ccagtttcaaagcagctctctc

SEQ ID NO: 68909 - DNA, 22 bp, synthetic construct
  misc_feature 1..22: note = chemically synthesized
  source 1..22: mol_type = other DNA
caaagcagctctctccatgtaa

SEQ ID NO: 68910 - DNA, 22 bp, synthetic construct
  misc_feature 1..22: note = chemically synthesized
  source 1..22: mol_type = other DNA
aaagcagctctctccatgtaat

SEQ ID NO: 68911 - DNA, 22 bp, synthetic construct
  misc_feature 1..22: note = chemically synthesized
  source 1..22: mol_type = other DNA
tctccatgtaatctttagtctc

SEQ ID NO: 68912 - DNA, 22 bp, synthetic construct
  misc_feature 1..22: note = chemically synthesized
  source 1..22: mol_type = other DNA
tccatgtaatctttagtctcaa

SEQ ID NO: 68913 - DNA, 22 bp, synthetic construct
  misc_feature 1..22: note = chemically synthesized
  source 1..22: mol_type = other DNA
catgtaatctttagtctcaatc

SEQ ID NO: 68914 - DNA, 22 bp, synthetic construct
  misc_feature 1..22: note = chemically synthesized
  source 1..22: mol_type = other DNA
tagtctcaatcgtaacagccct

SEQ ID NO: 68915 - DNA, 22 bp, synthetic construct
  misc_feature 1..22: note = chemically synthesized
  source 1..22: mol_type = other DNA
agtctcaatcgtaacagccctt

SEQ ID NO: 68916 - DNA, 22 bp, synthetic construct
  misc_feature 1..22: note = chemically synthesized
  source 1..22: mol_type = other DNA
gtctcaatcgtaacagcccttc

SEQ ID NO: 68917 - DNA, 22 bp, synthetic construct
  misc_feature 1..22: note = chemically synthesized
  source 1..22: mol_type = other DNA
aatcgtaacagcccttctcatt

SEQ ID NO: 68918 - DNA, 22 bp, synthetic construct
  misc_feature 1..22: note = chemically synthesized
  source 1..22: mol_type = other DNA
ctcattgacattatgattacac

SEQ ID NO: 68919 - DNA, 22 bp, synthetic construct
  misc_feature 1..22: note = chemically synthesized
  source 1..22: mol_type = other DNA
tcattgacattatgattacact

SEQ ID NO: 68920 - DNA, 22 bp, synthetic construct
  misc_feature 1..22: note = chemically synthesized
  source 1..22: mol_type = other DNA
attgacattatgattacactag

SEQ ID NO: 68921 - DNA, 22 bp, synthetic construct
  misc_feature 1..22: note = chemically synthesized
  source 1..22: mol_type = other DNA
acattatgattacactagctgc

SEQ ID NO: 68922 - DNA, 22 bp, synthetic construct
  misc_feature 1..22: note = chemically synthesized
  source 1..22: mol_type = other DNA
tgattacactagctgccctcat

SEQ ID NO: 68923 - DNA, 22 bp, synthetic construct
  misc_feature 1..22: note = chemically synthesized
  source 1..22: mol_type = other DNA
cactagctgccctcatgatcta

SEQ ID NO: 68924 - DNA, 22 bp, synthetic construct
  misc_feature 1..22: note = chemically synthesized
  source 1..22: mol_type = other DNA
gctgccctcatgatctagaata

SEQ ID NO: 68925 - DNA, 22 bp, synthetic construct
  misc_feature 1..22: note = chemically synthesized
  source 1..22: mol_type = other DNA
ccctcatgatctagaatatcta

SEQ ID NO: 68926 - DNA, 22 bp, synthetic construct
  misc_feature 1..22: note = chemically synthesized
  source 1..22: mol_type = other DNA
atgatctagaatatctagttga

SEQ ID NO: 68927 - DNA, 22 bp, synthetic construct
  misc_feature 1..22: note = chemically synthesized
  source 1..22: mol_type = other DNA
gaatatctagttgatgggaata

SEQ ID NO: 68928 - DNA, 22 bp, synthetic construct
  misc_feature 1..22: note = chemically synthesized
  source 1..22: mol_type = other DNA
gttgatgggaatactaaaatgc

SEQ ID NO: 68929 - DNA, 22 bp, synthetic construct
  misc_feature 1..22: note = chemically synthesized
  source 1..22: mol_type = other DNA
atgggaatactaaaatgcgata

SEQ ID NO: 68930 - DNA, 22 bp, synthetic construct
  misc_feature 1..22: note = chemically synthesized
  source 1..22: mol_type = other DNA
aaatgcgatagtgaaaactgta

SEQ ID NO: 68931 - DNA, 22 bp, synthetic construct
  misc_feature 1..22: note = chemically synthesized
  source 1..22: mol_type = other DNA
tatgttgtatgctcattataag

SEQ ID NO: 68932 - DNA, 22 bp, synthetic construct
  misc_feature 1..22: note = chemically synthesized
  source 1..22: mol_type = other DNA
tatgctcattataagataaaat

SEQ ID NO: 68933 - DNA, 22 bp, synthetic construct
  misc_feature 1..22: note = chemically synthesized
  source 1..22: mol_type = other DNA
attataagataaaatgccattt

SEQ ID NO: 68934 - DNA, 22 bp, synthetic construct
  misc_feature 1..22: note = chemically synthesized
  source 1..22: mol_type = other DNA
taagataaaatgccattttctc

SEQ ID NO: 68935 - DNA, 22 bp, synthetic construct
  misc_feature 1..22: note = chemically synthesized
  source 1..22: mol_type = other DNA
tctctgacctgatgtatgagag

SEQ ID NO: 68936 - DNA, 22 bp, synthetic construct
  misc_feature 1..22: note = chemically synthesized
  source 1..22: mol_type = other DNA
ctctgacctgatgtatgagaga

SEQ ID NO: 68937 - DNA, 22 bp, synthetic construct
  misc_feature 1..22: note = chemically synthesized
  source 1..22: mol_type = other DNA
tctgacctgatgtatgagagag

SEQ ID NO: 68938 - DNA, 22 bp, synthetic construct
  misc_feature 1..22: note = chemically synthesized
  source 1..22: mol_type = other DNA
tgacctgatgtatgagagagag

SEQ ID NO: 68939 - DNA, 22 bp, synthetic construct
  misc_feature 1..22: note = chemically synthesized
  source 1..22: mol_type = other DNA
acctgatgtatgagagagaggg

SEQ ID NO: 68940 - DNA, 22 bp, synthetic construct
  misc_feature 1..22: note = chemically synthesized
  source 1..22: mol_type = other DNA
atgtatgagagagaggggagga

SEQ ID NO: 68941 - DNA, 22 bp, synthetic construct
  misc_feature 1..22: note = chemically synthesized
  source 1..22: mol_type = other DNA
acatactgtagcatgatcacat

SEQ ID NO: 68942 - DNA, 22 bp, synthetic construct
  misc_feature 1..22: note = chemically synthesized
  source 1..22: mol_type = other DNA
tagcatgatcacataactggct

SEQ ID NO: 68943 - DNA, 22 bp, synthetic construct
  misc_feature 1..22: note = chemically synthesized
  source 1..22: mol_type = other DNA
gctctgaaaaaaagtttaggat

SEQ ID NO: 68944 - DNA, 22 bp, synthetic construct
  misc_feature 1..22: note = chemically synthesized
  source 1..22: mol_type = other DNA
tgaaaaaaagtttaggatgctc

SEQ ID NO: 68945 - DNA, 22 bp, synthetic construct
  misc_feature 1..22: note = chemically synthesized
  source 1..22: mol_type = other DNA
aaaaaaagtttaggatgctcag

SEQ ID NO: 68946 - DNA, 22 bp, synthetic construct
  misc_feature 1..22: note = chemically synthesized
  source 1..22: mol_type = other DNA
aggatgctcagggcagcaaaat

SEQ ID NO: 68947 - DNA, 22 bp, synthetic construct
  misc_feature 1..22: note = chemically synthesized
  source 1..22: mol_type = other DNA
ggatgctcagggcagcaaaata

SEQ ID NO: 68948 - DNA, 22 bp, synthetic construct
  misc_feature 1..22: note = chemically synthesized
  source 1..22: mol_type = other DNA
agggcagcaaaataaaatggac

SEQ ID NO: 68949 - DNA, 22 bp, synthetic construct
  misc_feature 1..22: note = chemically synthesized
  source 1..22: mol_type = other DNA
ttctcatttaagcctttttgaa

SEQ ID NO: 68950 - DNA, 22 bp, synthetic construct
  misc_feature 1..22: note = chemically synthesized
  source 1..22: mol_type = other DNA
tctcatttaagcctttttgaaa

SEQ ID NO: 68951 - DNA, 22 bp, synthetic construct
  misc_feature 1..22: note = chemically synthesized
  source 1..22: mol_type = other DNA
ctcatttaagcctttttgaaag

SEQ ID NO: 68952 - DNA, 22 bp, synthetic construct
  misc_feature 1..22: note = chemically synthesized
  source 1..22: mol_type = other DNA
tcatttaagcctttttgaaagg

SEQ ID NO: 68953 - DNA, 22 bp, synthetic construct
  misc_feature 1..22: note = chemically synthesized
  source 1..22: mol_type = other DNA
atttaagcctttttgaaaggat

SEQ ID NO: 68954 - DNA, 22 bp, synthetic construct
  misc_feature 1..22: note = chemically synthesized
  source 1..22: mol_type = other DNA
aagcctttttgaaaggatacaa

SEQ ID NO: 68955 - DNA, 22 bp, synthetic construct
  misc_feature 1..22: note = chemically synthesized
  source 1..22: mol_type = other DNA
agcctttttgaaaggatacaaa

SEQ ID NO: 68956 - DNA, 22 bp, synthetic construct
  misc_feature 1..22: note = chemically synthesized
  source 1..22: mol_type = other DNA
tttgaaaggatacaaatgagat

SEQ ID NO: 68957 - DNA, 22 bp, synthetic construct
  misc_feature 1..22: note = chemically synthesized
  source 1..22: mol_type = other DNA
ttgaaaggatacaaatgagatc

SEQ ID NO: 68958 - DNA, 22 bp, synthetic construct
  misc_feature 1..22: note = chemically synthesized
  source 1..22: mol_type = other DNA
tgaaaggatacaaatgagatcc

SEQ ID NO: 68959 - DNA, 22 bp, synthetic construct
  misc_feature 1..22: note = chemically synthesized
  source 1..22: mol_type = other DNA
gaaaggatacaaatgagatcct

SEQ ID NO: 68960 - DNA, 22 bp, synthetic construct
  misc_feature 1..22: note = chemically synthesized
  source 1..22: mol_type = other DNA
aaaggatacaaatgagatcctt

SEQ ID NO: 68961 - DNA, 22 bp, synthetic construct
  misc_feature 1..22: note = chemically synthesized
  source 1..22: mol_type = other DNA
gatgtagtgctgtatgccacag

SEQ ID NO: 68962 - DNA, 22 bp, synthetic construct
  misc_feature 1..22: note = chemically synthesized
  source 1..22: mol_type = other DNA
atgtagtgctgtatgccacaga

SEQ ID NO: 68963 - DNA, 22 bp, synthetic construct
  misc_feature 1..22: note = chemically synthesized
  source 1..22: mol_type = other DNA
tatgccacagattttggcattt

SEQ ID NO: 68964 - DNA, 22 bp, synthetic construct
  misc_feature 1..22: note = chemically synthesized
  source 1..22: mol_type = other DNA
tggcatttatcaatgactacaa

SEQ ID NO: 68965 - DNA, 22 bp, synthetic construct
  misc_feature 1..22: note = chemically synthesized
  source 1..22: mol_type = other DNA
ggcatttatcaatgactacaat

SEQ ID NO: 68966 - DNA, 22 bp, synthetic construct
  misc_feature 1..22: note = chemically synthesized
  source 1..22: mol_type = other DNA
gcatttatcaatgactacaatt

SEQ ID NO: 68967 - DNA, 22 bp, synthetic construct
  misc_feature 1..22: note = chemically synthesized
  source 1..22: mol_type = other DNA
atcaatgactacaattcatggc

SEQ ID NO: 68968 - DNA, 22 bp, synthetic construct
  misc_feature 1..22: note = chemically synthesized
  source 1..22: mol_type = other DNA
tcaatgactacaattcatggca

SEQ ID NO: 68969 - DNA, 22 bp, synthetic construct
  misc_feature 1..22: note = chemically synthesized
  source 1..22: mol_type = other DNA
caattcatggcacatgtgaaac

SEQ ID NO: 68970 - DNA, 22 bp, synthetic construct
  misc_feature 1..22: note = chemically synthesized
  source 1..22: mol_type = other DNA
atggcacatgtgaaaccagcac

SEQ ID NO: 68971 - DNA, 22 bp, synthetic construct
  misc_feature 1..22: note = chemically synthesized
  source 1..22: mol_type = other DNA
attatgagtctagtcctggatt

SEQ ID NO: 68972 - DNA, 22 bp, synthetic construct
  misc_feature 1..22: note = chemically synthesized
  source 1..22: mol_type = other DNA
tgagtctagtcctggatttcaa

SEQ ID NO: 68973 - DNA, 22 bp, synthetic construct
  misc_feature 1..22: note = chemically synthesized
  source 1..22: mol_type = other DNA
gtcctggatttcaatcgatgtt

SEQ ID NO: 68974 - DNA, 22 bp, synthetic construct
  misc_feature 1..22: note = chemically synthesized
  source 1..22: mol_type = other DNA
gatttcaatcgatgttttataa

SEQ ID NO: 68975 - DNA, 22 bp, synthetic construct
  misc_feature 1..22: note = chemically synthesized
  source 1..22: mol_type = other DNA
caatcgatgttttataaggtaa

SEQ ID NO: 68976 - DNA, 22 bp, synthetic construct
  misc_feature 1..22: note = chemically synthesized
  source 1..22: mol_type = other DNA
aatcgatgttttataaggtaaa

SEQ ID NO: 68977 - DNA, 22 bp, synthetic construct
  misc_feature 1..22: note = chemically synthesized
  source 1..22: mol_type = other DNA
tataaggtaaaatataatttta

SEQ ID NO: 68978 - DNA, 22 bp, synthetic construct
  misc_feature 1..22: note = chemically synthesized
  source 1..22: mol_type = other DNA
ataaggtaaaatataattttaa

SEQ ID NO: 68979 - DNA, 22 bp, synthetic construct
  misc_feature 1..22: note = chemically synthesized
  source 1..22: mol_type = other DNA
taaggtaaaatataattttaag

SEQ ID NO: 68980 - DNA, 22 bp, synthetic construct
  misc_feature 1..22: note = chemically synthesized
  source 1..22: mol_type = other DNA
taaggcatttggagtgatgaac

SEQ ID NO: 68981 - DNA, 22 bp, synthetic construct
  misc_feature 1..22: note = chemically synthesized
  source 1..22: mol_type = other DNA
aaggcatttggagtgatgaacg

SEQ ID NO: 68982 - DNA, 22 bp, synthetic construct
  misc_feature 1..22: note = chemically synthesized
  source 1..22: mol_type = other DNA
aggcatttggagtgatgaacgt

SEQ ID NO: 68983 - DNA, 22 bp, synthetic construct
  misc_feature 1..22: note = chemically synthesized
  source 1..22: mol_type = other DNA
ggagtgatgaacgtgttaagga

SEQ ID NO: 68984 - DNA, 22 bp, synthetic construct
  misc_feature 1..22: note = chemically synthesized
  source 1..22: mol_type = other DNA
gagtgatgaacgtgttaaggac

SEQ ID NO: 68985 - DNA, 22 bp, synthetic construct
  misc_feature 1..22: note = chemically synthesized
  source 1..22: mol_type = other DNA
aggacttggattatcagacaaa

SEQ ID NO: 68986 - DNA, 22 bp, synthetic construct
  misc_feature 1..22: note = chemically synthesized
  source 1..22: mol_type = other DNA
ggattatcagacaaatcttttt

SEQ ID NO: 68987 - DNA, 22 bp, synthetic construct
  misc_feature 1..22: note = chemically synthesized
  source 1..22: mol_type = other DNA
gattatcagacaaatcttttta

SEQ ID NO: 68988 - DNA, 22 bp, synthetic construct
  misc_feature 1..22: note = chemically synthesized
  source 1..22: mol_type = other DNA
tcagacaaatctttttacttgc

SEQ ID NO: 68989 - DNA, 22 bp, synthetic construct
  misc_feature 1..22: note = chemically synthesized
  source 1..22: mol_type = other DNA
tttacttgcccaactcagatcg

SEQ ID NO: 68990 - DNA, 22 bp, synthetic construct
  misc_feature 1..22: note = chemically synthesized
  source 1..22: mol_type = other DNA
ttacttgcccaactcagatcgt

SEQ ID NO: 68991 - DNA, 22 bp, synthetic construct
  misc_feature 1..22: note = chemically synthesized
  source 1..22: mol_type = other DNA
tacttgcccaactcagatcgtc

SEQ ID NO: 68992 - DNA, 22 bp, synthetic construct
  misc_feature 1..22: note = chemically synthesized
  source 1..22: mol_type = other DNA
acttgcccaactcagatcgtca

SEQ ID NO: 68993 - DNA, 22 bp, synthetic construct
  misc_feature 1..22: note = chemically synthesized
  source 1..22: mol_type = other DNA
cttgcccaactcagatcgtcag

SEQ ID NO: 68994 - DNA, 22 bp, synthetic construct
  misc_feature 1..22: note = chemically synthesized
  source 1..22: mol_type = other DNA
gcccaactcagatcgtcaggct

SEQ ID NO: 68995 - DNA, 22 bp, synthetic construct
  misc_feature 1..22: note = chemically synthesized
  source 1..22: mol_type = other DNA
cccaactcagatcgtcaggcta

SEQ ID NO: 68996 - DNA, 22 bp, synthetic construct
  misc_feature 1..22: note = chemically synthesized
  source 1..22: mol_type = other DNA
agatcgtcaggctaaataggaa

SEQ ID NO: 68997 - DNA, 22 bp, synthetic construct
  misc_feature 1..22: note = chemically synthesized
  source 1..22: mol_type = other DNA
aataggaatgatagtcacccag

SEQ ID NO: 68998 - DNA, 22 bp, synthetic construct
  misc_feature 1..22: note = chemically synthesized
  source 1..22: mol_type = other DNA
gggaggacaaggaggaagccac

SEQ ID NO: 68999 - DNA, 22 bp, synthetic construct
  misc_feature 1..22: note = chemically synthesized
  source 1..22: mol_type = other DNA
gaaccagatagttttttttcca

SEQ ID NO: 69000 - DNA, 22 bp, synthetic construct
  misc_feature 1..22: note = chemically synthesized
  source 1..22: mol_type = other DNA
tttttccagcctatttgggacc

SEQ ID NO: 69001 - DNA, 22 bp, synthetic construct
  misc_feature 1..22: note = chemically synthesized
  source 1..22: mol_type = other DNA
ttttccagcctatttgggaccc

SEQ ID NO: 69002 - DNA, 22 bp, synthetic construct
  misc_feature 1..22: note = chemically synthesized
  source 1..22: mol_type = other DNA
tttccagcctatttgggaccca

SEQ ID NO: 69003 - DNA, 22 bp, synthetic construct
  misc_feature 1..22: note = chemically synthesized
  source 1..22: mol_type = other DNA
ttccagcctatttgggacccaa

SEQ ID NO: 69004 - DNA, 22 bp, synthetic construct
  misc_feature 1..22: note = chemically synthesized
  source 1..22: mol_type = other DNA
tccagcctatttgggacccaag

SEQ ID NO: 69005 - DNA, 22 bp, synthetic construct
  misc_feature 1..22: note = chemically synthesized
  source 1..22: mol_type = other DNA
ccagcctatttgggacccaagt

SEQ ID NO: 69006 - DNA, 22 bp, synthetic construct
  misc_feature 1..22: note = chemically synthesized
  source 1..22: mol_type = other DNA
cagcctatttgggacccaagtt

SEQ ID NO: 69007 - DNA, 22 bp, synthetic construct
  misc_feature 1..22: note = chemically synthesized
  source 1..22: mol_type = other DNA
tttgggacccaagttattgttc

SEQ ID NO: 69008 - DNA, 22 bp, synthetic construct
  misc_feature 1..22: note = chemically synthesized
  source 1..22: mol_type = other DNA
gggacccaagttattgttcaac

SEQ ID NO: 69009 - DNA, 22 bp, synthetic construct
  misc_feature 1..22: note = chemically synthesized
  source 1..22: mol_type = other DNA
ggacccaagttattgttcaaca

SEQ ID NO: 69010 - DNA, 22 bp, synthetic construct
  misc_feature 1..22: note = chemically synthesized
  source 1..22: mol_type = other DNA
ttgttcaacaacaacaaaaaat

SEQ ID NO: 69011 - DNA, 22 bp, synthetic construct
  misc_feature 1..22: note = chemically synthesized
  source 1..22: mol_type = other DNA
ttcaacaacaacaaaaaattta

SEQ ID NO: 69012 - DNA, 22 bp, synthetic construct
  misc_feature 1..22: note = chemically synthesized
  source 1..22: mol_type = other DNA
aacaacaacaaaaaatttataa

SEQ ID NO: 69013 - DNA, 22 bp, synthetic construct
  misc_feature 1..22: note = chemically synthesized
  source 1..22: mol_type = other DNA
ataaaaatgttctcaatgaagc

SEQ ID NO: 69014 - DNA, 22 bp, synthetic construct
  misc_feature 1..22: note = chemically synthesized
  source 1..22: mol_type = other DNA
taaaaatgttctcaatgaagct

SEQ ID NO: 69015 - DNA, 22 bp, synthetic construct
  misc_feature 1..22: note = chemically synthesized
  source 1..22: mol_type = other DNA
tcaatgaagctttttatttccc

SEQ ID NO: 69016 - DNA, 22 bp, synthetic construct
  misc_feature 1..22: note = chemically synthesized
  source 1..22: mol_type = other DNA
aatgaagctttttatttccctt

SEQ ID NO: 69017 - DNA, 22 bp, synthetic construct
  misc_feature 1..22: note = chemically synthesized
  source 1..22: mol_type = other DNA
tttatttccctttgaagagagg

SEQ ID NO: 69018 - DNA, 22 bp, synthetic construct
  misc_feature 1..22: note = chemically synthesized
  source 1..22: mol_type = other DNA
ttatttccctttgaagagagga

SEQ ID NO: 69019 - DNA, 22 bp, synthetic construct
  misc_feature 1..22: note = chemically synthesized
  source 1..22: mol_type = other DNA
tatttccctttgaagagaggag

SEQ ID NO: 69020 - DNA, 22 bp, synthetic construct
  misc_feature 1..22: note = chemically synthesized
  source 1..22: mol_type = other DNA
atttccctttgaagagaggagg

SEQ ID NO: 69021 - DNA, 22 bp, synthetic construct
  misc_feature 1..22: note = chemically synthesized
  source 1..22: mol_type = other DNA
tttccctttgaagagaggaggc

SEQ ID NO: 69022 - DNA, 22 bp, synthetic construct
  misc_feature 1..22: note = chemically synthesized
  source 1..22: mol_type = other DNA
ccctttgaagagaggaggcaaa

SEQ ID NO: 69023 - DNA, 22 bp, synthetic construct
  misc_feature 1..22: note = chemically synthesized
  source 1..22: mol_type = other DNA
cctttgaagagaggaggcaaac

SEQ ID NO: 69024 - DNA, 22 bp, synthetic construct
  misc_feature 1..22: note = chemically synthesized
  source 1..22: mol_type = other DNA
tgaagagaggaggcaaacaaaa

SEQ ID NO: 69025 - DNA, 22 bp, synthetic construct
  misc_feature 1..22: note = chemically synthesized
  source 1..22: mol_type = other DNA
gaagagaggaggcaaacaaaaa

SEQ ID NO: 69026 - DNA, 22 bp, synthetic construct
  misc_feature 1..22: note = chemically synthesized
  source 1..22: mol_type = other DNA
aagagaggaggcaaacaaaaat

SEQ ID NO: 69027 - DNA, 22 bp, synthetic construct
  misc_feature 1..22: note = chemically synthesized
  source 1..22: mol_type = other DNA
atgtcagcgttttctttcaaaa

SEQ ID NO: 69028 - DNA, 22 bp, synthetic construct
  misc_feature 1..22: note = chemically synthesized
  source 1..22: mol_type = other DNA
tctttcaaaatctttctgcctt

SEQ ID NO: 69029 - DNA, 22 bp, synthetic construct
  misc_feature 1..22: note = chemically synthesized
  source 1..22: mol_type = other DNA
ctttcaaaatctttctgccttt

SEQ ID NO: 69030 - DNA, 22 bp, synthetic construct
  misc_feature 1..22: note = chemically synthesized
  source 1..22: mol_type = other DNA
tttcaaaatctttctgcctttt

SEQ ID NO: 69031 - DNA, 22 bp, synthetic construct
  misc_feature 1..22: note = chemically synthesized
  source 1..22: mol_type = other DNA
tcaaaatctttctgcctttttt

SEQ ID NO: 69032 - DNA, 22 bp, synthetic construct
  misc_feature 1..22: note = chemically synthesized
  source 1..22: mol_type = other DNA
caaaatctttctgccttttttc

SEQ ID NO: 69033 - DNA, 22 bp, synthetic construct
  misc_feature 1..22: note = chemically synthesized
  source 1..22: mol_type = other DNA
aaaatctttctgccttttttcc

SEQ ID NO: 69034 - DNA, 22 bp, synthetic construct
  misc_feature 1..22: note = chemically synthesized
  source 1..22: mol_type = other DNA
tctgccttttttcccccttcca

SEQ ID NO: 69035 - DNA, 22 bp, synthetic construct
  misc_feature 1..22: note = chemically synthesized
  source 1..22: mol_type = other DNA
ctgccttttttcccccttccac

SEQ ID NO: 69036 - DNA, 22 bp, synthetic construct
  misc_feature 1..22: note = chemically synthesized
  source 1..22: mol_type = other DNA
tgccttttttcccccttccaca

SEQ ID NO: 69037 - DNA, 22 bp, synthetic construct
  misc_feature 1..22: note = chemically synthesized
  source 1..22: mol_type = other DNA
ccttttttcccccttccacatt

SEQ ID NO: 69038 - DNA, 22 bp, synthetic construct
  misc_feature 1..22: note = chemically synthesized
  source 1..22: mol_type = other DNA
ttttcccccttccacattagac

SEQ ID NO: 69039 - DNA, 22 bp, synthetic construct
  misc_feature 1..22: note = chemically synthesized
  source 1..22: mol_type = other DNA
tttcccccttccacattagaca

SEQ ID NO: 69040 - DNA, 22 bp, synthetic construct
  misc_feature 1..22: note = chemically synthesized
  source 1..22: mol_type = other DNA
ttcccccttccacattagacaa

SEQ ID NO: 69041 - DNA, 22 bp, synthetic construct
  misc_feature 1..22: note = chemically synthesized
  source 1..22: mol_type = other DNA
tcccccttccacattagacaaa

SEQ ID NO: 69042 - DNA, 22 bp, synthetic construct
  misc_feature 1..22: note = chemically synthesized
  source 1..22: mol_type = other DNA
cccccttccacattagacaaat

SEQ ID NO: 69043 - DNA, 22 bp, synthetic construct
  misc_feature 1..22: note = chemically synthesized
  source 1..22: mol_type = other DNA
ccccttccacattagacaaatg

SEQ ID NO: 69044 - DNA, 22 bp, synthetic construct
  misc_feature 1..22: note = chemically synthesized
  source 1..22: mol_type = other DNA
ccacattagacaaatgtttgaa

SEQ ID NO: 69045 - DNA, 22 bp, synthetic construct
  misc_feature 1..22: note = chemically synthesized
  source 1..22: mol_type = other DNA
cacattagacaaatgtttgaaa

SEQ ID NO: 69046 - DNA, 22 bp, synthetic construct
  misc_feature 1..22: note = chemically synthesized
  source 1..22: mol_type = other DNA
gacaaatgtttgaaacctaatt

SEQ ID NO: 69047 - DNA, 22 bp, synthetic construct
  misc_feature 1..22: note = chemically synthesized
  source 1..22: mol_type = other DNA
gaaacctaattttggtatctta

SEQ ID NO: 69048 - DNA, 22 bp, synthetic construct
  misc_feature 1..22: note = chemically synthesized
  source 1..22: mol_type = other DNA
aaacctaattttggtatcttac

SEQ ID NO: 69049 - DNA, 22 bp, synthetic construct
  misc_feature 1..22: note = chemically synthesized
  source 1..22: mol_type = other DNA
attttggtatcttaccatctaa

SEQ ID NO: 69050 - DNA, 22 bp, synthetic construct
  misc_feature 1..22: note = chemically synthesized
  source 1..22: mol_type = other DNA
tggtatcttaccatctaatctt

SEQ ID NO: 69051 - DNA, 22 bp, synthetic construct
  misc_feature 1..22: note = chemically synthesized
  source 1..22: mol_type = other DNA
ggtatcttaccatctaatcttg

SEQ ID NO: 69052 - DNA, 22 bp, synthetic construct
  misc_feature 1..22: note = chemically synthesized
  source 1..22: mol_type = other DNA
gtatcttaccatctaatcttgt

SEQ ID NO: 69053 - DNA, 22 bp, synthetic construct
  misc_feature 1..22: note = chemically synthesized
  source 1..22: mol_type = other DNA
accatctaatcttgtttaagag

SEQ ID NO: 69054 - DNA, 22 bp, synthetic construct
  misc_feature 1..22: note = chemically synthesized
  source 1..22: mol_type = other DNA
ccatctaatcttgtttaagaga

SEQ ID NO: 69055 - DNA, 22 bp, synthetic construct
  misc_feature 1..22: note = chemically synthesized
  source 1..22: mol_type = other DNA
atcttgtttaagagatttaccc

SEQ ID NO: 69056 - DNA, 22 bp, synthetic construct
  misc_feature 1..22: note = chemically synthesized
  source 1..22: mol_type = other DNA
gtttaagagatttacccaggag

SEQ ID NO: 69057 - DNA, 22 bp, synthetic construct
  misc_feature 1..22: note = chemically synthesized
  source 1..22: mol_type = other DNA
tttaagagatttacccaggagt

SEQ ID NO: 69058 - DNA, 22 bp, synthetic construct
  misc_feature 1..22: note = chemically synthesized
  source 1..22: mol_type = other DNA
aagagatttacccaggagtgag

SEQ ID NO: 69059 - DNA, 22 bp, synthetic construct
  misc_feature 1..22: note = chemically synthesized
  source 1..22: mol_type = other DNA
agagatttacccaggagtgaga

SEQ ID NO: 69060 - DNA, 22 bp, synthetic construct
  misc_feature 1..22: note = chemically synthesized
  source 1..22: mol_type = other DNA
acccaggagtgagatatattga

SEQ ID NO: 69061 - DNA, 22 bp, synthetic construct
  misc_feature 1..22: note = chemically synthesized
  source 1..22: mol_type = other DNA
cccaggagtgagatatattgag

SEQ ID NO: 69062 - DNA, 22 bp, synthetic construct
  misc_feature 1..22: note = chemically synthesized
  source 1..22: mol_type = other DNA
agtgggattataaatgcgttgt

SEQ ID NO: 69063 - DNA, 22 bp, synthetic construct
  misc_feature 1..22: note = chemically synthesized
  source 1..22: mol_type = other DNA
taaatgcgttgtaaagtaaatt

SEQ ID NO: 69064 - DNA, 22 bp, synthetic construct
  misc_feature 1..22: note = chemically synthesized
  source 1..22: mol_type = other DNA
taaagtaaattacaaggtcagg

SEQ ID NO: 69065 - DNA, 22 bp, synthetic construct
  misc_feature 1..22: note = chemically synthesized
  source 1..22: mol_type = other DNA
caaggtcagggcaggagtccat

SEQ ID NO: 69066 - DNA, 22 bp, synthetic construct
  misc_feature 1..22: note = chemically synthesized
  source 1..22: mol_type = other DNA
tttagacaagtgcttgagcgag

SEQ ID NO: 69067 - DNA, 22 bp, synthetic construct
  misc_feature 1..22: note = chemically synthesized
  source 1..22: mol_type = other DNA
agacaagtgcttgagcgaggct

SEQ ID NO: 69068 - DNA, 22 bp, synthetic construct
  misc_feature 1..22: note = chemically synthesized
  source 1..22: mol_type = other DNA
gacaagtgcttgagcgaggctg

SEQ ID NO: 69069 - DNA, 22 bp, synthetic construct
  misc_feature 1..22: note = chemically synthesized
  source 1..22: mol_type = other DNA
gagcgaggctggcttattttgg

SEQ ID NO: 69070 - DNA, 22 bp, synthetic construct
  misc_feature 1..22: note = chemically synthesized
  source 1..22: mol_type = other DNA
agcgaggctggcttattttgga

SEQ ID NO: 69071 - DNA, 22 bp, synthetic construct
  misc_feature 1..22: note = chemically synthesized
  source 1..22: mol_type = other DNA
gcttattttggaataccagtgt

SEQ ID NO: 69072 - DNA, 22 bp, synthetic construct
  misc_feature 1..22: note = chemically synthesized
  source 1..22: mol_type = other DNA
attttggaataccagtgtttgg

SEQ ID NO: 69073 - DNA, 22 bp, synthetic construct
  misc_feature 1..22: note = chemically synthesized
  source 1..22: mol_type = other DNA
ttttggaataccagtgtttggg

SEQ ID NO: 69074 - DNA, 22 bp, synthetic construct
  misc_feature 1..22: note = chemically synthesized
  source 1..22: mol_type = other DNA
tggaataccagtgtttgggggc

SEQ ID NO: 69075 - DNA, 22 bp, synthetic construct
  misc_feature 1..22: note = chemically synthesized
  source 1..22: mol_type = other DNA
ggaataccagtgtttgggggct

SEQ ID NO: 69076 - DNA, 22 bp, synthetic construct
  misc_feature 1..22: note = chemically synthesized
  source 1..22: mol_type = other DNA
gaataccagtgtttgggggctc

SEQ ID NO: 69077 - DNA, 22 bp, synthetic construct
  misc_feature 1..22: note = chemically synthesized
  source 1..22: mol_type = other DNA
gggggctcctgagaagaccctg

SEQ ID NO: 69078 - DNA, 22 bp, synthetic construct
  misc_feature 1..22: note = chemically synthesized
  source 1..22: mol_type = other DNA
ggggctcctgagaagaccctgc

SEQ ID NO: 69079 - DNA, 22 bp, synthetic construct
  misc_feature 1..22: note = chemically synthesized
  source 1..22: mol_type = other DNA
ctgagaagaccctgccggcttt

SEQ ID NO: 69080 - DNA, 22 bp, synthetic construct
  misc_feature 1..22: note = chemically synthesized
  source 1..22: mol_type = other DNA
agaagaccctgccggcttttct

SEQ ID NO: 69081 - DNA, 22 bp, synthetic construct
  misc_feature 1..22: note = chemically synthesized
  source 1..22: mol_type = other DNA
ccggcttttctttctgacttgc

SEQ ID NO: 69082 - DNA, 22 bp, synthetic construct
  misc_feature 1..22: note = chemically synthesized
  source 1..22: mol_type = other DNA
ttctttctgacttgctaaatgg

SEQ ID NO: 69083 - DNA, 22 bp, synthetic construct
  misc_feature 1..22: note = chemically synthesized
  source 1..22: mol_type = other DNA
tctttctgacttgctaaatgga

SEQ ID NO: 69084 - DNA, 22 bp, synthetic construct
  misc_feature 1..22: note = chemically synthesized
  source 1..22: mol_type = other DNA
ctttctgacttgctaaatggag

SEQ ID NO: 69085 - DNA, 22 bp, synthetic construct
  misc_feature 1..22: note = chemically synthesized
  source 1..22: mol_type = other DNA
tttctgacttgctaaatggagg

SEQ ID NO: 69086 - DNA, 22 bp, synthetic construct
  misc_feature 1..22: note = chemically synthesized
  source 1..22: mol_type = other DNA
tctgacttgctaaatggaggca

SEQ ID NO: 69087 - DNA, 22 bp, synthetic construct
  misc_feature 1..22: note = chemically synthesized
  source 1..22: mol_type = other DNA
ctgacttgctaaatggaggcat

SEQ ID NO: 69088 - DNA, 22 bp, synthetic construct
  misc_feature 1..22: note = chemically synthesized
  source 1..22: mol_type = other DNA
tgacttgctaaatggaggcatc

SEQ ID NO: 69089 - DNA, 22 bp, synthetic construct
  misc_feature 1..22: note = chemically synthesized
  source 1..22: mol_type = other DNA
acttgctaaatggaggcatcat

SEQ ID NO: 69090 - DNA, 22 bp, synthetic construct
  misc_feature 1..22: note = chemically synthesized
  source 1..22: mol_type = other DNA
gctaaatggaggcatcatataa

SEQ ID NO: 69091 - DNA, 22 bp, synthetic construct
  misc_feature 1..22: note = chemically synthesized
  source 1..22: mol_type = other DNA
ctaaatggaggcatcatataat

SEQ ID NO: 69092 - DNA, 22 bp, synthetic construct
  misc_feature 1..22: note = chemically synthesized
  source 1..22: mol_type = other DNA
aatggaggcatcatataattga

SEQ ID NO: 69093 - DNA, 22 bp, synthetic construct
  misc_feature 1..22: note = chemically synthesized
  source 1..22: mol_type = other DNA
attaattcctcattctcactct

SEQ ID NO: 69094 - DNA, 22 bp, synthetic construct
  misc_feature 1..22: note = chemically synthesized
  source 1..22: mol_type = other DNA
attcctcattctcactcttaac

SEQ ID NO: 69095 - DNA, 22 bp, synthetic construct
  misc_feature 1..22: note = chemically synthesized
  source 1..22: mol_type = other DNA
ctcattctcactcttaacctcc

SEQ ID NO: 69096 - DNA, 22 bp, synthetic construct
  misc_feature 1..22: note = chemically synthesized
  source 1..22: mol_type = other DNA
attctcactcttaacctccctg

SEQ ID NO: 69097 - DNA, 22 bp, synthetic construct
  misc_feature 1..22: note = chemically synthesized
  source 1..22: mol_type = other DNA
tcactcttaacctccctggtag

SEQ ID NO: 69098 - DNA, 22 bp, synthetic construct
  misc_feature 1..22: note = chemically synthesized
  source 1..22: mol_type = other DNA
actcttaacctccctggtagat

SEQ ID NO: 69099 - DNA, 22 bp, synthetic construct
  misc_feature 1..22: note = chemically synthesized
  source 1..22: mol_type = other DNA
ttaacctccctggtagattttt

SEQ ID NO: 69100 - DNA, 22 bp, synthetic construct
  misc_feature 1..22: note = chemically synthesized
  source 1..22: mol_type = other DNA
aacctccctggtagattttttt

SEQ ID NO: 69101 - DNA, 22 bp, synthetic construct
  misc_feature 1..22: note = chemically synthesized
  source 1..22: mol_type = other DNA
acctccctggtagatttttttt

SEQ ID NO: 69102 - DNA, 22 bp, synthetic construct
  misc_feature 1..22: note = chemically synthesized
  source 1..22: mol_type = other DNA
cctggtagattttttttttttt

SEQ ID NO: 69103 - DNA, 22 bp, synthetic construct
  misc_feature 1..22: note = chemically synthesized
  source 1..22: mol_type = other DNA
gtagattttttttttttttcct

SEQ ID NO: 69104 - DNA, 22 bp, synthetic construct
  misc_feature 1..22: note = chemically synthesized
  source 1..22: mol_type = other DNA
tttttttttttccttcttagaa

SEQ ID NO: 69105 - DNA, 22 bp, synthetic construct
  misc_feature 1..22: note = chemically synthesized
  source 1..22: mol_type = other DNA
ttttttttttccttcttagaaa

SEQ ID NO: 69106 - DNA, 22 bp, synthetic construct
  misc_feature 1..22: note = chemically synthesized
  source 1..22: mol_type = other DNA
tttttttttccttcttagaaag

SEQ ID NO: 69107 - DNA, 22 bp, synthetic construct
  misc_feature 1..22: note = chemically synthesized
  source 1..22: mol_type = other DNA
ttttttttccttcttagaaagt

SEQ ID NO: 69108 - DNA, 22 bp, synthetic construct
  misc_feature 1..22: note = chemically synthesized
  source 1..22: mol_type = other DNA
tttttttccttcttagaaagtt

SEQ ID NO: 69109 - DNA, 22 bp, synthetic construct
  misc_feature 1..22: note = chemically synthesized
  source 1..22: mol_type = other DNA
ttttttccttcttagaaagtta

SEQ ID NO: 69110 - DNA, 22 bp, synthetic construct
  misc_feature 1..22: note = chemically synthesized
  source 1..22: mol_type = other DNA
tttttccttcttagaaagttac

SEQ ID NO: 69111 - DNA, 22 bp, synthetic construct
  misc_feature 1..22: note = chemically synthesized
  source 1..22: mol_type = other DNA
ttttccttcttagaaagttact

SEQ ID NO: 69112 - DNA, 22 bp, synthetic construct
  misc_feature 1..22: note = chemically synthesized
  source 1..22: mol_type = other DNA
tttccttcttagaaagttactg

SEQ ID NO: 69113 - DNA, 22 bp, synthetic construct
  misc_feature 1..22: note = chemically synthesized
  source 1..22: mol_type = other DNA
ttccttcttagaaagttactga

SEQ ID NO: 69114 - DNA, 22 bp, synthetic construct
  misc_feature 1..22: note = chemically synthesized
  source 1..22: mol_type = other DNA
tccttcttagaaagttactgac

SEQ ID NO: 69115 - DNA, 22 bp, synthetic construct
  misc_feature 1..22: note = chemically synthesized
  source 1..22: mol_type = other DNA
ccttcttagaaagttactgaca

SEQ ID NO: 69116 - DNA, 22 bp, synthetic construct
  misc_feature 1..22: note = chemically synthesized
  source 1..22: mol_type = other DNA
cttcttagaaagttactgacaa

SEQ ID NO: 69117 - DNA, 22 bp, synthetic construct
  misc_feature 1..22: note = chemically synthesized
  source 1..22: mol_type = other DNA
cttagaaagttactgacaaata

SEQ ID NO: 69118 - DNA, 22 bp, synthetic construct
  misc_feature 1..22: note = chemically synthesized
  source 1..22: mol_type = other DNA
ttagaaagttactgacaaatac

SEQ ID NO: 69119 - DNA, 22 bp, synthetic construct
  misc_feature 1..22: note = chemically synthesized
  source 1..22: mol_type = other DNA
agaaagttactgacaaatacta

SEQ ID NO: 69120 - DNA, 22 bp, synthetic construct
  misc_feature 1..22: note = chemically synthesized
  source 1..22: mol_type = other DNA
gaaagttactgacaaatactag

SEQ ID NO: 69121 - DNA, 22 bp, synthetic construct
  misc_feature 1..22: note = chemically synthesized
  source 1..22: mol_type = other DNA
ctgacaaatactagctgtggcc

SEQ ID NO: 69122 - DNA, 22 bp, synthetic construct
  misc_feature 1..22: note = chemically synthesized
  source 1..22: mol_type = other DNA
acaaatactagctgtggcctta

SEQ ID NO: 69123 - DNA, 22 bp, synthetic construct
  misc_feature 1..22: note = chemically synthesized
  source 1..22: mol_type = other DNA
gctgtggccttaaagaactctt

SEQ ID NO: 69124 - DNA, 22 bp, synthetic construct
  misc_feature 1..22: note = chemically synthesized
  source 1..22: mol_type = other DNA
tggccttaaagaactcttgcag

SEQ ID NO: 69125 - DNA, 22 bp, synthetic construct
  misc_feature 1..22: note = chemically synthesized
  source 1..22: mol_type = other DNA
aaagaactcttgcagcccttct

SEQ ID NO: 69126 - DNA, 22 bp, synthetic construct
  misc_feature 1..22: note = chemically synthesized
  source 1..22: mol_type = other DNA
aagaactcttgcagcccttctt

SEQ ID NO: 69127 - DNA, 22 bp, synthetic construct
  misc_feature 1..22: note = chemically synthesized
  source 1..22: mol_type = other DNA
ttgcagcccttcttttaaaaga

SEQ ID NO: 69128 - DNA, 22 bp, synthetic construct
  misc_feature 1..22: note = chemically synthesized
  source 1..22: mol_type = other DNA
gcagcccttcttttaaaagaag

SEQ ID NO: 69129 - DNA, 22 bp, synthetic construct
  misc_feature 1..22: note = chemically synthesized
  source 1..22: mol_type = other DNA
cagcccttcttttaaaagaagg

SEQ ID NO: 69130 - DNA, 22 bp, synthetic construct
  misc_feature 1..22: note = chemically synthesized
  source 1..22: mol_type = other DNA
cttttaaaagaaggagaaaagt

SEQ ID NO: 69131 - DNA, 22 bp, synthetic construct
  misc_feature 1..22: note = chemically synthesized
  source 1..22: mol_type = other DNA
ttttaaaagaaggagaaaagtt

SEQ ID NO: 69132 - DNA, 22 bp, synthetic construct
  misc_feature 1..22: note = chemically synthesized
  source 1..22: mol_type = other DNA
ttaaaagaaggagaaaagtttg

SEQ ID NO: 69133 - DNA, 22 bp, synthetic construct
  misc_feature 1..22: note = chemically synthesized
  source 1..22: mol_type = other DNA
taaaagaaggagaaaagtttgt

SEQ ID NO: 69134 - DNA, 22 bp, synthetic construct
  misc_feature 1..22: note = chemically synthesized
  source 1..22: mol_type = other DNA
aaaagaaggagaaaagtttgtt

SEQ ID NO: 69135 - DNA, 22 bp, synthetic construct
  misc_feature 1..22: note = chemically synthesized
  source 1..22: mol_type = other DNA
aaagaaggagaaaagtttgtta

SEQ ID NO: 69136 - DNA, 22 bp, synthetic construct
  misc_feature 1..22: note = chemically synthesized
  source 1..22: mol_type = other DNA
gttatttctcagttatatttta

SEQ ID NO: 69137 - DNA, 22 bp, synthetic construct
  misc_feature 1..22: note = chemically synthesized
  source 1..22: mol_type = other DNA
ttatttctcagttatattttaa

SEQ ID NO: 69138 - DNA, 22 bp, synthetic construct
  misc_feature 1..22: note = chemically synthesized
  source 1..22: mol_type = other DNA
tttctcagttatattttaaggc

SEQ ID NO: 69139 - DNA, 22 bp, synthetic construct
  misc_feature 1..22: note = chemically synthesized
  source 1..22: mol_type = other DNA
ctcagttatattttaaggcttt

SEQ ID NO: 69140 - DNA, 22 bp, synthetic construct
  misc_feature 1..22: note = chemically synthesized
  source 1..22: mol_type = other DNA
tcagttatattttaaggctttt

SEQ ID NO: 69141 - DNA, 22 bp, synthetic construct
  misc_feature 1..22: note = chemically synthesized
  source 1..22: mol_type = other DNA
agttatattttaaggctttttt

SEQ ID NO: 69142 - DNA, 22 bp, synthetic construct
  misc_feature 1..22: note = chemically synthesized
  source 1..22: mol_type = other DNA
tattttaaggctttttttttca

SEQ ID NO: 69143 - DNA, 22 bp, synthetic construct
  misc_feature 1..22: note = chemically synthesized
  source 1..22: mol_type = other DNA
taaggctttttttttcagaatc

SEQ ID NO: 69144 - DNA, 22 bp, synthetic construct
  misc_feature 1..22: note = chemically synthesized
  source 1..22: mol_type = other DNA
aaggctttttttttcagaatct

SEQ ID NO: 69145 - DNA, 22 bp, synthetic construct
  misc_feature 1..22: note = chemically synthesized
  source 1..22: mol_type = other DNA
aggctttttttttcagaatctc

SEQ ID NO: 69146 - DNA, 22 bp, synthetic construct
  misc_feature 1..22: note = chemically synthesized
  source 1..22: mol_type = other DNA
tttttttcagaatctctgggaa

SEQ ID NO: 69147 - DNA, 22 bp, synthetic construct
  misc_feature 1..22: note = chemically synthesized
  source 1..22: mol_type = other DNA
ttttttcagaatctctgggaag

SEQ ID NO: 69148 - DNA, 22 bp, synthetic construct
  misc_feature 1..22: note = chemically synthesized
  source 1..22: mol_type = other DNA
tttttcagaatctctgggaagt

SEQ ID NO: 69149 - DNA, 22 bp, synthetic construct
  misc_feature 1..22: note = chemically synthesized
  source 1..22: mol_type = other DNA
ttttcagaatctctgggaagtt

SEQ ID NO: 69150 - DNA, 22 bp, synthetic construct
  misc_feature 1..22: note = chemically synthesized
  source 1..22: mol_type = other DNA
tttcagaatctctgggaagttt

SEQ ID NO: 69151 - DNA, 22 bp, synthetic construct
  misc_feature 1..22: note = chemically synthesized
  source 1..22: mol_type = other DNA
ttcagaatctctgggaagtttt

SEQ ID NO: 69152 - DNA, 22 bp, synthetic construct
  misc_feature 1..22: note = chemically synthesized
  source 1..22: mol_type = other DNA
tcagaatctctgggaagttttg

SEQ ID NO: 69153 - DNA, 22 bp, synthetic construct
  misc_feature 1..22: note = chemically synthesized
  source 1..22: mol_type = other DNA
cagaatctctgggaagttttgt

SEQ ID NO: 69154 - DNA, 22 bp, synthetic construct
  misc_feature 1..22: note = chemically synthesized
  source 1..22: mol_type = other DNA
agaatctctgggaagttttgtt

SEQ ID NO: 69155 - DNA, 22 bp, synthetic construct
  misc_feature 1..22: note = chemically synthesized
  source 1..22: mol_type = other DNA
tgggaagttttgtttttctcat

SEQ ID NO: 69156 - DNA, 22 bp, synthetic construct
  misc_feature 1..22: note = chemically synthesized
  source 1..22: mol_type = other DNA
ggaagttttgtttttctcatcc

SEQ ID NO: 69157 - DNA, 22 bp, synthetic construct
  misc_feature 1..22: note = chemically synthesized
  source 1..22: mol_type = other DNA
tgtttttctcatcctcgtcctt

SEQ ID NO: 69158 - DNA, 22 bp, synthetic construct
  misc_feature 1..22: note = chemically synthesized
  source 1..22: mol_type = other DNA
gtttttctcatcctcgtccttt

SEQ ID NO: 69159 - DNA, 22 bp, synthetic construct
  misc_feature 1..22: note = chemically synthesized
  source 1..22: mol_type = other DNA
tttttctcatcctcgtcctttg

SEQ ID NO: 69160 - DNA, 22 bp, synthetic construct
  misc_feature 1..22: note = chemically synthesized
  source 1..22: mol_type = other DNA
ttctcatcctcgtcctttggct

SEQ ID NO: 69161 - DNA, 22 bp, synthetic construct
  misc_feature 1..22: note = chemically synthesized
  source 1..22: mol_type = other DNA
tctcatcctcgtcctttggcta

SEQ ID NO: 69162 - DNA, 22 bp, synthetic construct
  misc_feature 1..22: note = chemically synthesized
  source 1..22: mol_type = other DNA
ctcatcctcgtcctttggctac

SEQ ID NO: 69163 - DNA, 22 bp, synthetic construct
  misc_feature 1..22: note = chemically synthesized
  source 1..22: mol_type = other DNA
tcatcctcgtcctttggctacc

SEQ ID NO: 69164 - DNA, 22 bp, synthetic construct
  misc_feature 1..22: note = chemically synthesized
  source 1..22: mol_type = other DNA
atcctcgtcctttggctaccat

SEQ ID NO: 69165 - DNA, 22 bp, synthetic construct
  misc_feature 1..22: note = chemically synthesized
  source 1..22: mol_type = other DNA
gtcctttggctaccattacttc

SEQ ID NO: 69166 - DNA, 22 bp, synthetic construct
  misc_feature 1..22: note = chemically synthesized
  source 1..22: mol_type = other DNA
tggctaccattacttctgccct

SEQ ID NO: 69167 - DNA, 22 bp, synthetic construct
  misc_feature 1..22: note = chemically synthesized
  source 1..22: mol_type = other DNA
ggctaccattacttctgccctt

SEQ ID NO: 69168 - DNA, 22 bp, synthetic construct
  misc_feature 1..22: note = chemically synthesized
  source 1..22: mol_type = other DNA
gctaccattacttctgcccttt

SEQ ID NO: 69169 - DNA, 22 bp, synthetic construct
  misc_feature 1..22: note = chemically synthesized
  source 1..22: mol_type = other DNA
ccattacttctgccctttttaa

SEQ ID NO: 69170 - DNA, 22 bp, synthetic construct
  misc_feature 1..22: note = chemically synthesized
  source 1..22: mol_type = other DNA
cttctgccctttttaatgttgc

SEQ ID NO: 69171 - DNA, 22 bp, synthetic construct
  misc_feature 1..22: note = chemically synthesized
  source 1..22: mol_type = other DNA
ctgccctttttaatgttgcagt

SEQ ID NO: 69172 - DNA, 22 bp, synthetic construct
  misc_feature 1..22: note = chemically synthesized
  source 1..22: mol_type = other DNA
tgccctttttaatgttgcagtt

SEQ ID NO: 69173 - DNA, 22 bp, synthetic construct
  misc_feature 1..22: note = chemically synthesized
  source 1..22: mol_type = other DNA
ccctttttaatgttgcagttga

SEQ ID NO: 69174 - DNA, 22 bp, synthetic construct
  misc_feature 1..22: note = chemically synthesized
  source 1..22: mol_type = other DNA
tttaatgttgcagttgactagt

SEQ ID NO: 69175 - DNA, 22 bp, synthetic construct
  misc_feature 1..22: note = chemically synthesized
  source 1..22: mol_type = other DNA
ttaatgttgcagttgactagta

SEQ ID NO: 69176 - DNA, 22 bp, synthetic construct
  misc_feature 1..22: note = chemically synthesized
  source 1..22: mol_type = other DNA
taatgttgcagttgactagtaa

SEQ ID NO: 69177 - DNA, 22 bp, synthetic construct
  misc_feature 1..22: note = chemically synthesized
  source 1..22: mol_type = other DNA
aatgttgcagttgactagtaaa

SEQ ID NO: 69178 - DNA, 22 bp, synthetic construct
  misc_feature 1..22: note = chemically synthesized
  source 1..22: mol_type = other DNA
atgttgcagttgactagtaaac

SEQ ID NO: 69179 - DNA, 22 bp, synthetic construct
  misc_feature 1..22: note = chemically synthesized
  source 1..22: mol_type = other DNA
cagttgactagtaaactgttgg

SEQ ID NO: 69180 - DNA, 22 bp, synthetic construct
  misc_feature 1..22: note = chemically synthesized
  source 1..22: mol_type = other DNA
actagtaaactgttggtcagtt

SEQ ID NO: 69181 - DNA, 22 bp, synthetic construct
  misc_feature 1..22: note = chemically synthesized
  source 1..22: mol_type = other DNA
gtaaactgttggtcagttattc

SEQ ID NO: 69182 - DNA, 22 bp, synthetic construct
  misc_feature 1..22: note = chemically synthesized
  source 1..22: mol_type = other DNA
ttggtcagttattccatatata

SEQ ID NO: 69183 - DNA, 22 bp, synthetic construct
  misc_feature 1..22: note = chemically synthesized
  source 1..22: mol_type = other DNA
gtcagttattccatatatatat

SEQ ID NO: 69184 - DNA, 22 bp, synthetic construct
  misc_feature 1..22: note = chemically synthesized
  source 1..22: mol_type = other DNA
ttccatatatatatatatttaa

SEQ ID NO: 69185 - DNA, 22 bp, synthetic construct
  misc_feature 1..22: note = chemically synthesized
  source 1..22: mol_type = other DNA
catatatatatatatttaatgt

SEQ ID NO: 69186 - DNA, 22 bp, synthetic construct
  misc_feature 1..22: note = chemically synthesized
  source 1..22: mol_type = other DNA
aatgtagctatctccccatata

SEQ ID NO: 69187 - DNA, 22 bp, synthetic construct
  misc_feature 1..22: note = chemically synthesized
  source 1..22: mol_type = other DNA
atgtagctatctccccatatat

SEQ ID NO: 69188 - DNA, 22 bp, synthetic construct
  misc_feature 1..22: note = chemically synthesized
  source 1..22: mol_type = other DNA
tctccccatatatatttaattt

SEQ ID NO: 69189 - DNA, 22 bp, synthetic construct
  misc_feature 1..22: note = chemically synthesized
  source 1..22: mol_type = other DNA
cccatatatatttaatttagcc

SEQ ID NO: 69190 - DNA, 22 bp, synthetic construct
  misc_feature 1..22: note = chemically synthesized
  source 1..22: mol_type = other DNA
aatttagccatctccccaaatg

SEQ ID NO: 69191 - DNA, 22 bp, synthetic construct
  misc_feature 1..22: note = chemically synthesized
  source 1..22: mol_type = other DNA
atttagccatctccccaaatga

SEQ ID NO: 69192 - DNA, 22 bp, synthetic construct
  misc_feature 1..22: note = chemically synthesized
  source 1..22: mol_type = other DNA
agccatctccccaaatgaaata

SEQ ID NO: 69193 - DNA, 22 bp, synthetic construct
  misc_feature 1..22: note = chemically synthesized
  source 1..22: mol_type = other DNA
gccatctccccaaatgaaatat

SEQ ID NO: 69194 - DNA, 22 bp, synthetic construct
  misc_feature 1..22: note = chemically synthesized
  source 1..22: mol_type = other DNA
cccaaatgaaatattttgtgaa

SEQ ID NO: 69195 - DNA, 22 bp, synthetic construct
  misc_feature 1..22: note = chemically synthesized
  source 1..22: mol_type = other DNA
tgtgaagtcaagctggcccttc

SEQ ID NO: 69196 - DNA, 22 bp, synthetic construct
  misc_feature 1..22: note = chemically synthesized
  source 1..22: mol_type = other DNA
gtgaagtcaagctggcccttct

SEQ ID NO: 69197 - DNA, 22 bp, synthetic construct
  misc_feature 1..22: note = chemically synthesized
  source 1..22: mol_type = other DNA
tgaagtcaagctggcccttctt

SEQ ID NO: 69198 - DNA, 22 bp, synthetic construct
  misc_feature 1..22: note = chemically synthesized
  source 1..22: mol_type = other DNA
gcccttctttgccaaagtggca

SEQ ID NO: 69199 - DNA, 22 bp, synthetic construct
  misc_feature 1..22: note = chemically synthesized
  source 1..22: mol_type = other DNA
ctttgccaaagtggcatttacc

SEQ ID NO: 69200 - DNA, 22 bp, synthetic construct
  misc_feature 1..22: note = chemically synthesized
  source 1..22: mol_type = other DNA
tttgccaaagtggcatttacca

SEQ ID NO: 69201 - DNA, 22 bp, synthetic construct
  misc_feature 1..22: note = chemically synthesized
  source 1..22: mol_type = other DNA
tgccaaagtggcatttaccact

SEQ ID NO: 69202 - DNA, 22 bp, synthetic construct
  misc_feature 1..22: note = chemically synthesized
  source 1..22: mol_type = other DNA
gccaaagtggcatttaccactc

SEQ ID NO: 69203 - DNA, 22 bp, synthetic construct
  misc_feature 1..22: note = chemically synthesized
  source 1..22: mol_type = other DNA
ccaaagtggcatttaccactct

SEQ ID NO: 69204 - DNA, 22 bp, synthetic construct
  misc_feature 1..22: note = chemically synthesized
  source 1..22: mol_type = other DNA
accactcttgggttcttttcag

SEQ ID NO: 69205 - DNA, 22 bp, synthetic construct
  misc_feature 1..22: note = chemically synthesized
  source 1..22: mol_type = other DNA
ccactcttgggttcttttcagc

SEQ ID NO: 69206 - DNA, 22 bp, synthetic construct
  misc_feature 1..22: note = chemically synthesized
  source 1..22: mol_type = other DNA
ttgggttcttttcagcaaggga

SEQ ID NO: 69207 - DNA, 22 bp, synthetic construct
  misc_feature 1..22: note = chemically synthesized
  source 1..22: mol_type = other DNA
gggttcttttcagcaagggaaa

SEQ ID NO: 69208 - DNA, 22 bp, synthetic construct
  misc_feature 1..22: note = chemically synthesized
  source 1..22: mol_type = other DNA
ggttcttttcagcaagggaaat

SEQ ID NO: 69209 - DNA, 22 bp, synthetic construct
  misc_feature 1..22: note = chemically synthesized
  source 1..22: mol_type = other DNA
ttttcagcaagggaaataatgt

SEQ ID NO: 69210 - DNA, 22 bp, synthetic construct
  misc_feature 1..22: note = chemically synthesized
  source 1..22: mol_type = other DNA
ttcagcaagggaaataatgtga

SEQ ID NO: 69211 - DNA, 22 bp, synthetic construct
  misc_feature 1..22: note = chemically synthesized
  source 1..22: mol_type = other DNA
tcagcaagggaaataatgtgac

SEQ ID NO: 69212 - DNA, 22 bp, synthetic construct
  misc_feature 1..22: note = chemically synthesized
  source 1..22: mol_type = other DNA
cagcaagggaaataatgtgact

SEQ ID NO: 69213 - DNA, 22 bp, synthetic construct
  misc_feature 1..22: note = chemically synthesized
  source 1..22: mol_type = other DNA
agcaagggaaataatgtgactt

SEQ ID NO: 69214 - DNA, 22 bp, synthetic construct
  misc_feature 1..22: note = chemically synthesized
  source 1..22: mol_type = other DNA
aagcagggcccctctccagacg

SEQ ID NO: 69215 - DNA, 22 bp, synthetic construct
  misc_feature 1..22: note = chemically synthesized
  source 1..22: mol_type = other DNA
agcagggcccctctccagacgg

SEQ ID NO: 69216 - DNA, 22 bp, synthetic construct
  misc_feature 1..22: note = chemically synthesized
  source 1..22: mol_type = other DNA
tccagacggcttggctactggc

SEQ ID NO: 69217 - DNA, 22 bp, synthetic construct
  misc_feature 1..22: note = chemically synthesized
  source 1..22: mol_type = other DNA
cagacggcttggctactggcca

SEQ ID NO: 69218 - DNA, 22 bp, synthetic construct
  misc_feature 1..22: note = chemically synthesized
  source 1..22: mol_type = other DNA
ggctactggccagagttgacta

SEQ ID NO: 69219 - DNA, 22 bp, synthetic construct
  misc_feature 1..22: note = chemically synthesized
  source 1..22: mol_type = other DNA
gctactggccagagttgactag

SEQ ID NO: 69220 - DNA, 22 bp, synthetic construct
  misc_feature 1..22: note = chemically synthesized
  source 1..22: mol_type = other DNA
ctggccagagttgactagctga

SEQ ID NO: 69221 - DNA, 22 bp, synthetic construct
  misc_feature 1..22: note = chemically synthesized
  source 1..22: mol_type = other DNA
gccagagttgactagctgaact

SEQ ID NO: 69222 - DNA, 22 bp, synthetic construct
  misc_feature 1..22: note = chemically synthesized
  source 1..22: mol_type = other DNA
actagctgaactgtatctttct

SEQ ID NO: 69223 - DNA, 22 bp, synthetic construct
  misc_feature 1..22: note = chemically synthesized
  source 1..22: mol_type = other DNA
gctgaactgtatctttctgttt

SEQ ID NO: 69224 - DNA, 22 bp, synthetic construct
  misc_feature 1..22: note = chemically synthesized
  source 1..22: mol_type = other DNA
aactgtatctttctgtttcttt

SEQ ID NO: 69225 - DNA, 22 bp, synthetic construct
  misc_feature 1..22: note = chemically synthesized
  source 1..22: mol_type = other DNA
tatctttctgtttctttctcaa

SEQ ID NO: 69226 - DNA, 22 bp, synthetic construct
  misc_feature 1..22: note = chemically synthesized
  source 1..22: mol_type = other DNA
tctgtttctttctcaactggag

SEQ ID NO: 69227 - DNA, 22 bp, synthetic construct
  misc_feature 1..22: note = chemically synthesized
  source 1..22: mol_type = other DNA
ctgtttctttctcaactggagc

SEQ ID NO: 69228 - DNA, 22 bp, synthetic construct
  misc_feature 1..22: note = chemically synthesized
  source 1..22: mol_type = other DNA
tgtttctttctcaactggagct

SEQ ID NO: 69229 - DNA, 22 bp, synthetic construct
  misc_feature 1..22: note = chemically synthesized
  source 1..22: mol_type = other DNA
tttctttctcaactggagctga

SEQ ID NO: 69230 - DNA, 22 bp, synthetic construct
  misc_feature 1..22: note = chemically synthesized
  source 1..22: mol_type = other DNA
ctttctcaactggagctgagtc

SEQ ID NO: 69231 - DNA, 22 bp, synthetic construct
  misc_feature 1..22: note = chemically synthesized
  source 1..22: mol_type = other DNA
tttctcaactggagctgagtcc

SEQ ID NO: 69232 - DNA, 22 bp, synthetic construct
  misc_feature 1..22: note = chemically synthesized
  source 1..22: mol_type = other DNA
tctcaactggagctgagtccca

SEQ ID NO: 69233 - DNA, 22 bp, synthetic construct
  misc_feature 1..22: note = chemically synthesized
  source 1..22: mol_type = other DNA
ctcaactggagctgagtcccag

SEQ ID NO: 69234 - DNA, 22 bp, synthetic construct
  misc_feature 1..22: note = chemically synthesized
  source 1..22: mol_type = other DNA
tcaactggagctgagtcccagc

SEQ ID NO: 69235 - DNA, 22 bp, synthetic construct
  misc_feature 1..22: note = chemically synthesized
  source 1..22: mol_type = other DNA
aactggagctgagtcccagccg

SEQ ID NO: 69236 - DNA, 22 bp, synthetic construct
  misc_feature 1..22: note = chemically synthesized
  source 1..22: mol_type = other DNA
gagctgagtcccagccgagggc

SEQ ID NO: 69237 - DNA, 22 bp, synthetic construct
  misc_feature 1..22: note = chemically synthesized
  source 1..22: mol_type = other DNA
agtcccagccgagggcgcagga

SEQ ID NO: 69238 - DNA, 22 bp, synthetic construct
  misc_feature 1..22: note = chemically synthesized
  source 1..22: mol_type = other DNA
tataatttggttcacgttgtta

SEQ ID NO: 69239 - DNA, 22 bp, synthetic construct
  misc_feature 1..22: note = chemically synthesized
  source 1..22: mol_type = other DNA
ggttcacgttgttagcctctca

SEQ ID NO: 69240 - DNA, 22 bp, synthetic construct
  misc_feature 1..22: note = chemically synthesized
  source 1..22: mol_type = other DNA
gttcacgttgttagcctctcaa

SEQ ID NO: 69241 - DNA, 22 bp, synthetic construct
  misc_feature 1..22: note = chemically synthesized
  source 1..22: mol_type = other DNA
acgttgttagcctctcaaaaca

SEQ ID NO: 69242 - DNA, 22 bp, synthetic construct
  misc_feature 1..22: note = chemically synthesized
  source 1..22: mol_type = other DNA
ttagcctctcaaaacaatgagg

SEQ ID NO: 69243 - DNA, 22 bp, synthetic construct
  misc_feature 1..22: note = chemically synthesized
  source 1..22: mol_type = other DNA
gcctctcaaaacaatgaggagg

SEQ ID NO: 69244 - DNA, 22 bp, synthetic construct
  misc_feature 1..22: note = chemically synthesized
  source 1..22: mol_type = other DNA
tcaaaacaatgaggaggaggat

SEQ ID NO: 69245 - DNA, 22 bp, synthetic construct
  misc_feature 1..22: note = chemically synthesized
  source 1..22: mol_type = other DNA
aaaacaatgaggaggaggatag

SEQ ID NO: 69246 - DNA, 22 bp, synthetic construct
  misc_feature 1..22: note = chemically synthesized
  source 1..22: mol_type = other DNA
ctcagcctgctgcctgtcatgg

SEQ ID NO: 69247 - DNA, 22 bp, synthetic construct
  misc_feature 1..22: note = chemically synthesized
  source 1..22: mol_type = other DNA
tcagcctgctgcctgtcatggc

SEQ ID NO: 69248 - DNA, 22 bp, synthetic construct
  misc_feature 1..22: note = chemically synthesized
  source 1..22: mol_type = other DNA
agcctgctgcctgtcatggcgc

SEQ ID NO: 69249 - DNA, 22 bp, synthetic construct
  misc_feature 1..22: note = chemically synthesized
  source 1..22: mol_type = other DNA
ctgcctgtcatggcgctggctg

SEQ ID NO: 69250 - DNA, 22 bp, synthetic construct
  misc_feature 1..22: note = chemically synthesized
  source 1..22: mol_type = other DNA
cctgtcatggcgctggctgttt

SEQ ID NO: 69251 - DNA, 22 bp, synthetic construct
  misc_feature 1..22: note = chemically synthesized
  source 1..22: mol_type = other DNA
tcatggcgctggctgttttaac

SEQ ID NO: 69252 - DNA, 22 bp, synthetic construct
  misc_feature 1..22: note = chemically synthesized
  source 1..22: mol_type = other DNA
gctgttttaactgttccttaaa

SEQ ID NO: 69253 - DNA, 22 bp, synthetic construct
  misc_feature 1..22: note = chemically synthesized
  source 1..22: mol_type = other DNA
ttttaactgttccttaaactag

SEQ ID NO: 69254 - DNA, 22 bp, synthetic construct
  misc_feature 1..22: note = chemically synthesized
  source 1..22: mol_type = other DNA
taactgttccttaaactaggat

SEQ ID NO: 69255 - DNA, 22 bp, synthetic construct
  misc_feature 1..22: note = chemically synthesized
  source 1..22: mol_type = other DNA
aactgttccttaaactaggatg

SEQ ID NO: 69256 - DNA, 22 bp, synthetic construct
  misc_feature 1..22: note = chemically synthesized
  source 1..22: mol_type = other DNA
actgttccttaaactaggatgc

SEQ ID NO: 69257 - DNA, 22 bp, synthetic construct
  misc_feature 1..22: note = chemically synthesized
  source 1..22: mol_type = other DNA
ttccttaaactaggatgctgtg

SEQ ID NO: 69258 - DNA, 22 bp, synthetic construct
  misc_feature 1..22: note = chemically synthesized
  source 1..22: mol_type = other DNA
cttaaactaggatgctgtgtct

SEQ ID NO: 69259 - DNA, 22 bp, synthetic construct
  misc_feature 1..22: note = chemically synthesized
  source 1..22: mol_type = other DNA
aaactaggatgctgtgtctgct

SEQ ID NO: 69260 - DNA, 22 bp, synthetic construct
  misc_feature 1..22: note = chemically synthesized
  source 1..22: mol_type = other DNA
aactaggatgctgtgtctgctt

SEQ ID NO: 69261 - DNA, 22 bp, synthetic construct
  misc_feature 1..22: note = chemically synthesized
  source 1..22: mol_type = other DNA
ggatgctgtgtctgcttaagtc

SEQ ID NO: 69262 - DNA, 22 bp, synthetic construct
  misc_feature 1..22: note = chemically synthesized
  source 1..22: mol_type = other DNA
tgtctgcttaagtcggcaccag

SEQ ID NO: 69263 - DNA, 22 bp, synthetic construct
  misc_feature 1..22: note = chemically synthesized
  source 1..22: mol_type = other DNA
cttaagtcggcaccagccactc

SEQ ID NO: 69264 - DNA, 22 bp, synthetic construct
  misc_feature 1..22: note = chemically synthesized
  source 1..22: mol_type = other DNA
aagtcggcaccagccactcctc

SEQ ID NO: 69265 - DNA, 22 bp, synthetic construct
  misc_feature 1..22: note = chemically synthesized
  source 1..22: mol_type = other DNA
agtcggcaccagccactcctcc

SEQ ID NO: 69266 - DNA, 22 bp, synthetic construct
  misc_feature 1..22: note = chemically synthesized
  source 1..22: mol_type = other DNA
ctcctaacttttccagacttgc

SEQ ID NO: 69267 - DNA, 22 bp, synthetic construct
  misc_feature 1..22: note = chemically synthesized
  source 1..22: mol_type = other DNA
ctaacttttccagacttgcatt

SEQ ID NO: 69268 - DNA, 22 bp, synthetic construct
  misc_feature 1..22: note = chemically synthesized
  source 1..22: mol_type = other DNA
acttttccagacttgcatttgt

SEQ ID NO: 69269 - DNA, 22 bp, synthetic construct
  misc_feature 1..22: note = chemically synthesized
  source 1..22: mol_type = other DNA
ttccagacttgcatttgtctga

SEQ ID NO: 69270 - DNA, 22 bp, synthetic construct
  misc_feature 1..22: note = chemically synthesized
  source 1..22: mol_type = other DNA
tccagacttgcatttgtctgac

SEQ ID NO: 69271 - DNA, 22 bp, synthetic construct
  misc_feature 1..22: note = chemically synthesized
  source 1..22: mol_type = other DNA
ccagacttgcatttgtctgacc

SEQ ID NO: 69272 - DNA, 22 bp, synthetic construct
  misc_feature 1..22: note = chemically synthesized
  source 1..22: mol_type = other DNA
cagacttgcatttgtctgaccg

SEQ ID NO: 69273 - DNA, 22 bp, synthetic construct
  misc_feature 1..22: note = chemically synthesized
  source 1..22: mol_type = other DNA
gcatttgtctgaccgggggaca

SEQ ID NO: 69274 - DNA, 22 bp, synthetic construct
  misc_feature 1..22: note = chemically synthesized
  source 1..22: mol_type = other DNA
catttgtctgaccgggggacaa

SEQ ID NO: 69275 - DNA, 22 bp, synthetic construct
  misc_feature 1..22: note = chemically synthesized
  source 1..22: mol_type = other DNA
gtctgaccgggggacaactcct

SEQ ID NO: 69276 - DNA, 22 bp, synthetic construct
  misc_feature 1..22: note = chemically synthesized
  source 1..22: mol_type = other DNA
tctgaccgggggacaactccta

SEQ ID NO: 69277 - DNA, 22 bp, synthetic construct
  misc_feature 1..22: note = chemically synthesized
  source 1..22: mol_type = other DNA
accgggggacaactcctaaaga

SEQ ID NO: 69278 - DNA, 22 bp, synthetic construct
  misc_feature 1..22: note = chemically synthesized
  source 1..22: mol_type = other DNA
ctaaagattggatacagcctat

SEQ ID NO: 69279 - DNA, 22 bp, synthetic construct
  misc_feature 1..22: note = chemically synthesized
  source 1..22: mol_type = other DNA
aagattggatacagcctatccg

SEQ ID NO: 69280 - DNA, 22 bp, synthetic construct
  misc_feature 1..22: note = chemically synthesized
  source 1..22: mol_type = other DNA
gatacagcctatccgttaaatc

SEQ ID NO: 69281 - DNA, 22 bp, synthetic construct
  misc_feature 1..22: note = chemically synthesized
  source 1..22: mol_type = other DNA
tccgttaaatctgaatgaagtt

SEQ ID NO: 69282 - DNA, 22 bp, synthetic construct
  misc_feature 1..22: note = chemically synthesized
  source 1..22: mol_type = other DNA
aatctgaatgaagtttttcttt

SEQ ID NO: 69283 - DNA, 22 bp, synthetic construct
  misc_feature 1..22: note = chemically synthesized
  source 1..22: mol_type = other DNA
aatgaagtttttctttcagatt

SEQ ID NO: 69284 - DNA, 22 bp, synthetic construct
  misc_feature 1..22: note = chemically synthesized
  source 1..22: mol_type = other DNA
ttctttcagattttttaaacat

SEQ ID NO: 69285 - DNA, 22 bp, synthetic construct
  misc_feature 1..22: note = chemically synthesized
  source 1..22: mol_type = other DNA
tctttcagattttttaaacatt

SEQ ID NO: 69286 - DNA, 22 bp, synthetic construct
  misc_feature 1..22: note = chemically synthesized
  source 1..22: mol_type = other DNA
ctttcagattttttaaacattc

SEQ ID NO: 69287 - DNA, 22 bp, synthetic construct
  misc_feature 1..22: note = chemically synthesized
  source 1..22: mol_type = other DNA
tttcagattttttaaacattct

SEQ ID NO: 69288 - DNA, 22 bp, synthetic construct
  misc_feature 1..22: note = chemically synthesized
  source 1..22: mol_type = other DNA
tcagattttttaaacattcttt

SEQ ID NO: 69289 - DNA, 22 bp, synthetic construct
  misc_feature 1..22: note = chemically synthesized
  source 1..22: mol_type = other DNA
cagattttttaaacattctttg

SEQ ID NO: 69290 - DNA, 22 bp, synthetic construct
  misc_feature 1..22: note = chemically synthesized
  source 1..22: mol_type = other DNA
agattttttaaacattctttga

SEQ ID NO: 69291 - DNA, 22 bp, synthetic construct
  misc_feature 1..22: note = chemically synthesized
  source 1..22: mol_type = other DNA
tttaaacattctttgagataaa

SEQ ID NO: 69292 - DNA, 22 bp, synthetic construct
  misc_feature 1..22: note = chemically synthesized
  source 1..22: mol_type = other DNA
ttaaacattctttgagataaaa

SEQ ID NO: 69293 - DNA, 22 bp, synthetic construct
  misc_feature 1..22: note = chemically synthesized
  source 1..22: mol_type = other DNA
taaacattctttgagataaaaa

SEQ ID NO: 69294 - DNA, 22 bp, synthetic construct
  misc_feature 1..22: note = chemically synthesized
  source 1..22: mol_type = other DNA
aaacattctttgagataaaaat

SEQ ID NO: 69295 - DNA, 22 bp, synthetic construct
  misc_feature 1..22: note = chemically synthesized
  source 1..22: mol_type = other DNA
aacattctttgagataaaaatg

SEQ ID NO: 69296 - DNA, 22 bp, synthetic construct
  misc_feature 1..22: note = chemically synthesized
  source 1..22: mol_type = other DNA
tttgagataaaaatggacgtcc

SEQ ID NO: 69297 - DNA, 22 bp, synthetic construct
  misc_feature 1..22: note = chemically synthesized
  source 1..22: mol_type = other DNA
tgagataaaaatggacgtcccc

SEQ ID NO: 69298 - DNA, 22 bp, synthetic construct
  misc_feature 1..22: note = chemically synthesized
  source 1..22: mol_type = other DNA
gagataaaaatggacgtcccca

SEQ ID NO: 69299 - DNA, 22 bp, synthetic construct
  misc_feature 1..22: note = chemically synthesized
  source 1..22: mol_type = other DNA
agataaaaatggacgtccccat

SEQ ID NO: 69300 - DNA, 22 bp, synthetic construct
  misc_feature 1..22: note = chemically synthesized
  source 1..22: mol_type = other DNA
tggaaccaaaattgggactcac

SEQ ID NO: 69301 - DNA, 22 bp, synthetic construct
  misc_feature 1..22: note = chemically synthesized
  source 1..22: mol_type = other DNA
ggactcactgatcctcccacag

SEQ ID NO: 69302 - DNA, 22 bp, synthetic construct
  misc_feature 1..22: note = chemically synthesized
  source 1..22: mol_type = other DNA
actgatcctcccacagtctggg

SEQ ID NO: 69303 - DNA, 22 bp, synthetic construct
  misc_feature 1..22: note = chemically synthesized
  source 1..22: mol_type = other DNA
atcctcccacagtctggggtgt

SEQ ID NO: 69304 - DNA, 22 bp, synthetic construct
  misc_feature 1..22: note = chemically synthesized
  source 1..22: mol_type = other DNA
ccacagtctggggtgtgagaat

SEQ ID NO: 69305 - DNA, 22 bp, synthetic construct
  misc_feature 1..22: note = chemically synthesized
  source 1..22: mol_type = other DNA
gggtgtgagaatgttgctagtc

SEQ ID NO: 69306 - DNA, 22 bp, synthetic construct
  misc_feature 1..22: note = chemically synthesized
  source 1..22: mol_type = other DNA
ctagtcttttttccacggaagt

SEQ ID NO: 69307 - DNA, 22 bp, synthetic construct
  misc_feature 1..22: note = chemically synthesized
  source 1..22: mol_type = other DNA
gtcttttttccacggaagtatt

SEQ ID NO: 69308 - DNA, 22 bp, synthetic construct
  misc_feature 1..22: note = chemically synthesized
  source 1..22: mol_type = other DNA
ttttccacggaagtattttatg

SEQ ID NO: 69309 - DNA, 22 bp, synthetic construct
  misc_feature 1..22: note = chemically synthesized
  source 1..22: mol_type = other DNA
tttccacggaagtattttatga

SEQ ID NO: 69310 - DNA, 22 bp, synthetic construct
  misc_feature 1..22: note = chemically synthesized
  source 1..22: mol_type = other DNA
ttccacggaagtattttatgag

SEQ ID NO: 69311 - DNA, 22 bp, synthetic construct
  misc_feature 1..22: note = chemically synthesized
  source 1..22: mol_type = other DNA
tccacggaagtattttatgagt

SEQ ID NO: 69312 - DNA, 22 bp, synthetic construct
  misc_feature 1..22: note = chemically synthesized
  source 1..22: mol_type = other DNA
ccacggaagtattttatgagta

SEQ ID NO: 69313 - DNA, 22 bp, synthetic construct
  misc_feature 1..22: note = chemically synthesized
  source 1..22: mol_type = other DNA
cacggaagtattttatgagtac

SEQ ID NO: 69314 - DNA, 22 bp, synthetic construct
  misc_feature 1..22: note = chemically synthesized
  source 1..22: mol_type = other DNA
tatgagtaccctctcattttaa

SEQ ID NO: 69315 - DNA, 22 bp, synthetic construct
  misc_feature 1..22: note = chemically synthesized
  source 1..22: mol_type = other DNA
atgagtaccctctcattttaac

SEQ ID NO: 69316 - DNA, 22 bp, synthetic construct
  misc_feature 1..22: note = chemically synthesized
  source 1..22: mol_type = other DNA
tgagtaccctctcattttaaca

SEQ ID NO: 69317 - DNA, 22 bp, synthetic construct
  misc_feature 1..22: note = chemically synthesized
  source 1..22: mol_type = other DNA
tcattttaacaatatcaacaat

SEQ ID NO: 69318 - DNA, 22 bp, synthetic construct
  misc_feature 1..22: note = chemically synthesized
  source 1..22: mol_type = other DNA
attttaacaatatcaacaatta

SEQ ID NO: 69319 - DNA, 22 bp, synthetic construct
  misc_feature 1..22: note = chemically synthesized
  source 1..22: mol_type = other DNA
taacaatatcaacaattagtgt

SEQ ID NO: 69320 - DNA, 22 bp, synthetic construct
  misc_feature 1..22: note = chemically synthesized
  source 1..22: mol_type = other DNA
aacaatatcaacaattagtgtg

SEQ ID NO: 69321 - DNA, 22 bp, synthetic construct
  misc_feature 1..22: note = chemically synthesized
  source 1..22: mol_type = other DNA
acaatatcaacaattagtgtgt

SEQ ID NO: 69322 - DNA, 22 bp, synthetic construct
  misc_feature 1..22: note = chemically synthesized
  source 1..22: mol_type = other DNA
gtgtgtttcaggctaatgctga

SEQ ID NO: 69323 - DNA, 22 bp, synthetic construct
  misc_feature 1..22: note = chemically synthesized
  source 1..22: mol_type = other DNA
caggctaatgctgaaagcatct

SEQ ID NO: 69324 - DNA, 22 bp, synthetic construct
  misc_feature 1..22: note = chemically synthesized
  source 1..22: mol_type = other DNA
aggctaatgctgaaagcatctt

SEQ ID NO: 69325 - DNA, 22 bp, synthetic construct
  misc_feature 1..22: note = chemically synthesized
  source 1..22: mol_type = other DNA
atgctgaaagcatctttagggc

SEQ ID NO: 69326 - DNA, 22 bp, synthetic construct
  misc_feature 1..22: note = chemically synthesized
  source 1..22: mol_type = other DNA
aaagcatctttagggccataga

SEQ ID NO: 69327 - DNA, 22 bp, synthetic construct
  misc_feature 1..22: note = chemically synthesized
  source 1..22: mol_type = other DNA
tagggccatagaacattgtagt

SEQ ID NO: 69328 - DNA, 22 bp, synthetic construct
  misc_feature 1..22: note = chemically synthesized
  source 1..22: mol_type = other DNA
agggccatagaacattgtagtg

SEQ ID NO: 69329 - DNA, 22 bp, synthetic construct
  misc_feature 1..22: note = chemically synthesized
  source 1..22: mol_type = other DNA
gggccatagaacattgtagtga

SEQ ID NO: 69330 - DNA, 22 bp, synthetic construct
  misc_feature 1..22: note = chemically synthesized
  source 1..22: mol_type = other DNA
tagtgagttgaccttcttcccc

SEQ ID NO: 69331 - DNA, 22 bp, synthetic construct
  misc_feature 1..22: note = chemically synthesized
  source 1..22: mol_type = other DNA
accttcttccccttttttgata

SEQ ID NO: 69332 - DNA, 22 bp, synthetic construct
  misc_feature 1..22: note = chemically synthesized
  source 1..22: mol_type = other DNA
cttccccttttttgatacctct

SEQ ID NO: 69333 - DNA, 22 bp, synthetic construct
  misc_feature 1..22: note = chemically synthesized
  source 1..22: mol_type = other DNA
ttccccttttttgatacctcta

SEQ ID NO: 69334 - DNA, 22 bp, synthetic construct
  misc_feature 1..22: note = chemically synthesized
  source 1..22: mol_type = other DNA
ccccttttttgatacctctatg

SEQ ID NO: 69335 - DNA, 22 bp, synthetic construct
  misc_feature 1..22: note = chemically synthesized
  source 1..22: mol_type = other DNA
cccttttttgatacctctatga

SEQ ID NO: 69336 - DNA, 22 bp, synthetic construct
  misc_feature 1..22: note = chemically synthesized
  source 1..22: mol_type = other DNA
ttttgatacctctatgaaatgt

SEQ ID NO: 69337 - DNA, 22 bp, synthetic construct
  misc_feature 1..22: note = chemically synthesized
  source 1..22: mol_type = other DNA
tttgatacctctatgaaatgtt

SEQ ID NO: 69338 - DNA, 22 bp, synthetic construct
  misc_feature 1..22: note = chemically synthesized
  source 1..22: mol_type = other DNA
ttgatacctctatgaaatgttt

SEQ ID NO: 69339 - DNA, 22 bp, synthetic construct
  misc_feature 1..22: note = chemically synthesized
  source 1..22: mol_type = other DNA
tgatacctctatgaaatgtttg

SEQ ID NO: 69340 - DNA, 22 bp, synthetic construct
  misc_feature 1..22: note = chemically synthesized
  source 1..22: mol_type = other DNA
gatacctctatgaaatgtttgc

SEQ ID NO: 69341 - DNA, 22 bp, synthetic construct
  misc_feature 1..22: note = chemically synthesized
  source 1..22: mol_type = other DNA
atacctctatgaaatgtttgcc

SEQ ID NO: 69342 - DNA, 22 bp, synthetic construct
  misc_feature 1..22: note = chemically synthesized
  source 1..22: mol_type = other DNA
tatgaaatgtttgcctatttag

SEQ ID NO: 69343 - DNA, 22 bp, synthetic construct
  misc_feature 1..22: note = chemically synthesized
  source 1..22: mol_type = other DNA
tgaaatgtttgcctatttagaa

SEQ ID NO: 69344 - DNA, 22 bp, synthetic construct
  misc_feature 1..22: note = chemically synthesized
  source 1..22: mol_type = other DNA
gcctatttagaaagttcacctg

SEQ ID NO: 69345 - DNA, 22 bp, synthetic construct
  misc_feature 1..22: note = chemically synthesized
  source 1..22: mol_type = other DNA
cctatttagaaagttcacctgt

SEQ ID NO: 69346 - DNA, 22 bp, synthetic construct
  misc_feature 1..22: note = chemically synthesized
  source 1..22: mol_type = other DNA
tttagaaagttcacctgtcacc

SEQ ID NO: 69347 - DNA, 22 bp, synthetic construct
  misc_feature 1..22: note = chemically synthesized
  source 1..22: mol_type = other DNA
agaaagttcacctgtcacccag

SEQ ID NO: 69348 - DNA, 22 bp, synthetic construct
  misc_feature 1..22: note = chemically synthesized
  source 1..22: mol_type = other DNA
gaaagttcacctgtcacccagg

SEQ ID NO: 69349 - DNA, 22 bp, synthetic construct
  misc_feature 1..22: note = chemically synthesized
  source 1..22: mol_type = other DNA
acctgtcacccaggggggaata

SEQ ID NO: 69350 - DNA, 22 bp, synthetic construct
  misc_feature 1..22: note = chemically synthesized
  source 1..22: mol_type = other DNA
tcacccaggggggaatagaaag

SEQ ID NO: 69351 - DNA, 22 bp, synthetic construct
  misc_feature 1..22: note = chemically synthesized
  source 1..22: mol_type = other DNA
ggatttaggaagccaaaaagtt

SEQ ID NO: 69352 - DNA, 22 bp, synthetic construct
  misc_feature 1..22: note = chemically synthesized
  source 1..22: mol_type = other DNA
aggaagccaaaaagtttccttg

SEQ ID NO: 69353 - DNA, 22 bp, synthetic construct
  misc_feature 1..22: note = chemically synthesized
  source 1..22: mol_type = other DNA
ggaagccaaaaagtttccttgg

SEQ ID NO: 69354 - DNA, 22 bp, synthetic construct
  misc_feature 1..22: note = chemically synthesized
  source 1..22: mol_type = other DNA
ccttgggtcaccttgtccaagt

SEQ ID NO: 69355 - DNA, 22 bp, synthetic construct
  misc_feature 1..22: note = chemically synthesized
  source 1..22: mol_type = other DNA
cttgggtcaccttgtccaagtt

SEQ ID NO: 69356 - DNA, 22 bp, synthetic construct
  misc_feature 1..22: note = chemically synthesized
  source 1..22: mol_type = other DNA
gggtcaccttgtccaagtttct

SEQ ID NO: 69357 - DNA, 22 bp, synthetic construct
  misc_feature 1..22: note = chemically synthesized
  source 1..22: mol_type = other DNA
ggtcaccttgtccaagtttctc

SEQ ID NO: 69358 - DNA, 22 bp, synthetic construct
  misc_feature 1..22: note = chemically synthesized
  source 1..22: mol_type = other DNA
gtccaagtttctcacttaacaa

SEQ ID NO: 69359 - DNA, 22 bp, synthetic construct
  misc_feature 1..22: note = chemically synthesized
  source 1..22: mol_type = other DNA
tccaagtttctcacttaacaag

SEQ ID NO: 69360 - DNA, 22 bp, synthetic construct
  misc_feature 1..22: note = chemically synthesized
  source 1..22: mol_type = other DNA
ctcacttaacaaggaggaaaca

SEQ ID NO: 69361 - DNA, 22 bp, synthetic construct
  misc_feature 1..22: note = chemically synthesized
  source 1..22: mol_type = other DNA
tcacttaacaaggaggaaacag

SEQ ID NO: 69362 - DNA, 22 bp, synthetic construct
  misc_feature 1..22: note = chemically synthesized
  source 1..22: mol_type = other DNA
acttaacaaggaggaaacagag

SEQ ID NO: 69363 - DNA, 22 bp, synthetic construct
  misc_feature 1..22: note = chemically synthesized
  source 1..22: mol_type = other DNA
aacaaggaggaaacagaggcac

SEQ ID NO: 69364 - DNA, 22 bp, synthetic construct
  misc_feature 1..22: note = chemically synthesized
  source 1..22: mol_type = other DNA
acaaggaggaaacagaggcaca

SEQ ID NO: 69365 - DNA, 22 bp, synthetic construct
  misc_feature 1..22: note = chemically synthesized
  source 1..22: mol_type = other DNA
gccccaaactacagctgatgga

SEQ ID NO: 69366 - DNA, 22 bp, synthetic construct
  misc_feature 1..22: note = chemically synthesized
  source 1..22: mol_type = other DNA
ccccaaactacagctgatggaa

SEQ ID NO: 69367 - DNA, 22 bp, synthetic construct
  misc_feature 1..22: note = chemically synthesized
  source 1..22: mol_type = other DNA
cagctgatggaactggaaagtt

SEQ ID NO: 69368 - DNA, 22 bp, synthetic construct
  misc_feature 1..22: note = chemically synthesized
  source 1..22: mol_type = other DNA
atggaactggaaagtttagaag

SEQ ID NO: 69369 - DNA, 22 bp, synthetic construct
  misc_feature 1..22: note = chemically synthesized
  source 1..22: mol_type = other DNA
gaaagtttagaagacatttgtt

SEQ ID NO: 69370 - DNA, 22 bp, synthetic construct
  misc_feature 1..22: note = chemically synthesized
  source 1..22: mol_type = other DNA
agaagacatttgttgaggtgcc

SEQ ID NO: 69371 - DNA, 22 bp, synthetic construct
  misc_feature 1..22: note = chemically synthesized
  source 1..22: mol_type = other DNA
gaagacatttgttgaggtgcct

SEQ ID NO: 69372 - DNA, 22 bp, synthetic construct
  misc_feature 1..22: note = chemically synthesized
  source 1..22: mol_type = other DNA
gttgaggtgcctagaatgtagg

SEQ ID NO: 69373 - DNA, 22 bp, synthetic construct
  misc_feature 1..22: note = chemically synthesized
  source 1..22: mol_type = other DNA
ttgaggtgcctagaatgtaggg

SEQ ID NO: 69374 - DNA, 22 bp, synthetic construct
  misc_feature 1..22: note = chemically synthesized
  source 1..22: mol_type = other DNA
aggtgcctagaatgtagggacc

SEQ ID NO: 69375 - DNA, 22 bp, synthetic construct
  misc_feature 1..22: note = chemically synthesized
  source 1..22: mol_type = other DNA
gaatgtagggaccttcatcctc

SEQ ID NO: 69376 - DNA, 22 bp, synthetic construct
  misc_feature 1..22: note = chemically synthesized
  source 1..22: mol_type = other DNA
catcctcaagccagaactggtc

SEQ ID NO: 69377 - DNA, 22 bp, synthetic construct
  misc_feature 1..22: note = chemically synthesized
  source 1..22: mol_type = other DNA
atcctcaagccagaactggtca

SEQ ID NO: 69378 - DNA, 22 bp, synthetic construct
  misc_feature 1..22: note = chemically synthesized
  source 1..22: mol_type = other DNA
aagccagaactggtcaggattt

SEQ ID NO: 69379 - DNA, 22 bp, synthetic construct
  misc_feature 1..22: note = chemically synthesized
  source 1..22: mol_type = other DNA
gtcaggatttttctgctttggg

SEQ ID NO: 69380 - DNA, 22 bp, synthetic construct
  misc_feature 1..22: note = chemically synthesized
  source 1..22: mol_type = other DNA
ttctgctttggggattggatat

SEQ ID NO: 69381 - DNA, 22 bp, synthetic construct
  misc_feature 1..22: note = chemically synthesized
  source 1..22: mol_type = other DNA
tctgctttggggattggatata

SEQ ID NO: 69382 - DNA, 22 bp, synthetic construct
  misc_feature 1..22: note = chemically synthesized
  source 1..22: mol_type = other DNA
ctgctttggggattggatataa

SEQ ID NO: 69383 - DNA, 22 bp, synthetic construct
  misc_feature 1..22: note = chemically synthesized
  source 1..22: mol_type = other DNA
tgctttggggattggatataaa

SEQ ID NO: 69384 - DNA, 22 bp, synthetic construct
  misc_feature 1..22: note = chemically synthesized
  source 1..22: mol_type = other DNA
ctttggggattggatataaaat

SEQ ID NO: 69385 - DNA, 22 bp, synthetic construct
  misc_feature 1..22: note = chemically synthesized
  source 1..22: mol_type = other DNA
tggggattggatataaaatttc

SEQ ID NO: 69386 - DNA, 22 bp, synthetic construct
  misc_feature 1..22: note = chemically synthesized
  source 1..22: mol_type = other DNA
ggggattggatataaaatttct

SEQ ID NO: 69387 - DNA, 22 bp, synthetic construct
  misc_feature 1..22: note = chemically synthesized
  source 1..22: mol_type = other DNA
gggattggatataaaatttcta

SEQ ID NO: 69388 - DNA, 22 bp, synthetic construct
  misc_feature 1..22: note = chemically synthesized
  source 1..22: mol_type = other DNA
gatataaaatttctagaactga

SEQ ID NO: 69389 - DNA, 22 bp, synthetic construct
  misc_feature 1..22: note = chemically synthesized
  source 1..22: mol_type = other DNA
ctagaactgagtttaatggcag

SEQ ID NO: 69390 - DNA, 22 bp, synthetic construct
  misc_feature 1..22: note = chemically synthesized
  source 1..22: mol_type = other DNA
tagaactgagtttaatggcagg

SEQ ID NO: 69391 - DNA, 22 bp, synthetic construct
  misc_feature 1..22: note = chemically synthesized
  source 1..22: mol_type = other DNA
gaactgagtttaatggcaggaa

SEQ ID NO: 69392 - DNA, 22 bp, synthetic construct
  misc_feature 1..22: note = chemically synthesized
  source 1..22: mol_type = other DNA
agtttaatggcaggaagatcaa

SEQ ID NO: 69393 - DNA, 22 bp, synthetic construct
  misc_feature 1..22: note = chemically synthesized
  source 1..22: mol_type = other DNA
aatggcaggaagatcaattgga

SEQ ID NO: 69394 - DNA, 22 bp, synthetic construct
  misc_feature 1..22: note = chemically synthesized
  source 1..22: mol_type = other DNA
atggcaggaagatcaattggac

SEQ ID NO: 69395 - DNA, 22 bp, synthetic construct
  misc_feature 1..22: note = chemically synthesized
  source 1..22: mol_type = other DNA
gaccaatatttactgggtaccc

SEQ ID NO: 69396 - DNA, 22 bp, synthetic construct
  misc_feature 1..22: note = chemically synthesized
  source 1..22: mol_type = other DNA
actgggtacccatgctcagacg

SEQ ID NO: 69397 - DNA, 22 bp, synthetic construct
  misc_feature 1..22: note = chemically synthesized
  source 1..22: mol_type = other DNA
ctgggtacccatgctcagacgt

SEQ ID NO: 69398 - DNA, 22 bp, synthetic construct
  misc_feature 1..22: note = chemically synthesized
  source 1..22: mol_type = other DNA
ggtacccatgctcagacgtgcc

SEQ ID NO: 69399 - DNA, 22 bp, synthetic construct
  misc_feature 1..22: note = chemically synthesized
  source 1..22: mol_type = other DNA
agacgtgccaggcacagggggt

SEQ ID NO: 69400 - DNA, 22 bp, synthetic construct
  misc_feature 1..22: note = chemically synthesized
  source 1..22: mol_type = other DNA
aggccttggggttgaggggtgg

SEQ ID NO: 69401 - DNA, 22 bp, synthetic construct
  misc_feature 1..22: note = chemically synthesized
  source 1..22: mol_type = other DNA
ggccttggggttgaggggtggg

SEQ ID NO: 69402 - DNA, 22 bp, synthetic construct
  misc_feature 1..22: note = chemically synthesized
  source 1..22: mol_type = other DNA
ggggttgaggggtgggggcagg

SEQ ID NO: 69403 - DNA, 22 bp, synthetic construct
  misc_feature 1..22: note = chemically synthesized
  source 1..22: mol_type = other DNA
gggttgaggggtgggggcaggg

SEQ ID NO: 69404 - DNA, 22 bp, synthetic construct
  misc_feature 1..22: note = chemically synthesized
  source 1..22: mol_type = other DNA
aggggtgggggcagggaaggct

SEQ ID NO: 69405 - DNA, 22 bp, synthetic construct
  misc_feature 1..22: note = chemically synthesized
  source 1..22: mol_type = other DNA
gaggtggaacataaataagcaa

SEQ ID NO: 69406 - DNA, 22 bp, synthetic construct
  misc_feature 1..22: note = chemically synthesized
  source 1..22: mol_type = other DNA
ctgatgcccgcctcagtgatta

SEQ ID NO: 69407 - DNA, 22 bp, synthetic construct
  misc_feature 1..22: note = chemically synthesized
  source 1..22: mol_type = other DNA
atgcccgcctcagtgattaaac

SEQ ID NO: 69408 - DNA, 22 bp, synthetic construct
  misc_feature 1..22: note = chemically synthesized
  source 1..22: mol_type = other DNA
agtgattaaacattgatgttgg

SEQ ID NO: 69409 - DNA, 22 bp, synthetic construct
  misc_feature 1..22: note = chemically synthesized
  source 1..22: mol_type = other DNA
aacattgatgttggtgttgtat

SEQ ID NO: 69410 - DNA, 22 bp, synthetic construct
  misc_feature 1..22: note = chemically synthesized
  source 1..22: mol_type = other DNA
atgttggtgttgtattattttg

SEQ ID NO: 69411 - DNA, 22 bp, synthetic construct
  misc_feature 1..22: note = chemically synthesized
  source 1..22: mol_type = other DNA
gtgttgtattattttgcaggta

SEQ ID NO: 69412 - DNA, 22 bp, synthetic construct
  misc_feature 1..22: note = chemically synthesized
  source 1..22: mol_type = other DNA
tattattttgcaggtaaagatg

SEQ ID NO: 69413 - DNA, 22 bp, synthetic construct
  misc_feature 1..22: note = chemically synthesized
  source 1..22: mol_type = other DNA
ttttgcaggtaaagatgagccc

SEQ ID NO: 69414 - DNA, 22 bp, synthetic construct
  misc_feature 1..22: note = chemically synthesized
  source 1..22: mol_type = other DNA
tgcaggtaaagatgagcccagc

SEQ ID NO: 69415 - DNA, 22 bp, synthetic construct
  misc_feature 1..22: note = chemically synthesized
  source 1..22: mol_type = other DNA
gcaggtaaagatgagcccagca

SEQ ID NO: 69416 - DNA, 22 bp, synthetic construct
  misc_feature 1..22: note = chemically synthesized
  source 1..22: mol_type = other DNA
caggtaaagatgagcccagcag

SEQ ID NO: 69417 - DNA, 22 bp, synthetic construct
  misc_feature 1..22: note = chemically synthesized
  source 1..22: mol_type = other DNA
cacatgtacaacttgcaaacag

SEQ ID NO: 69418 - DNA, 22 bp, synthetic construct
  misc_feature 1..22: note = chemically synthesized
  source 1..22: mol_type = other DNA
gcaaacagccattcaccagtgc

SEQ ID NO: 69419 - DNA, 22 bp, synthetic construct
  misc_feature 1..22: note = chemically synthesized
  source 1..22: mol_type = other DNA
caaacagccattcaccagtgca

SEQ ID NO: 69420 - DNA, 22 bp, synthetic construct
  misc_feature 1..22: note = chemically synthesized
  source 1..22: mol_type = other DNA
accagtgcatggtttctcttgc

SEQ ID NO: 69421 - DNA, 22 bp, synthetic construct
  misc_feature 1..22: note = chemically synthesized
  source 1..22: mol_type = other DNA
ctcttgcaacacgcacagaaca

SEQ ID NO: 69422 - DNA, 22 bp, synthetic construct
  misc_feature 1..22: note = chemically synthesized
  source 1..22: mol_type = other DNA
tcttgcaacacgcacagaacac

SEQ ID NO: 69423 - DNA, 22 bp, synthetic construct
  misc_feature 1..22: note = chemically synthesized
  source 1..22: mol_type = other DNA
ttgcaacacgcacagaacactc

SEQ ID NO: 69424 - DNA, 22 bp, synthetic construct
  misc_feature 1..22: note = chemically synthesized
  source 1..22: mol_type = other DNA
gcaacacgcacagaacactcat

SEQ ID NO: 69425 - DNA, 22 bp, synthetic construct
  misc_feature 1..22: note = chemically synthesized
  source 1..22: mol_type = other DNA
caacacgcacagaacactcatg

SEQ ID NO: 69426 - DNA, 22 bp, synthetic construct
  misc_feature 1..22: note = chemically synthesized
  source 1..22: mol_type = other DNA
atggattaagaatctacttaga

SEQ ID NO: 69427 - DNA, 22 bp, synthetic construct
  misc_feature 1..22: note = chemically synthesized
  source 1..22: mol_type = other DNA
agaatctacttagaaagcgaac

SEQ ID NO: 69428 - DNA, 22 bp, synthetic construct
  misc_feature 1..22: note = chemically synthesized
  source 1..22: mol_type = other DNA
cttagaaagcgaacacggaagt

SEQ ID NO: 69429 - DNA, 22 bp, synthetic construct
  misc_feature 1..22: note = chemically synthesized
  source 1..22: mol_type = other DNA
agaaagcgaacacggaagtccc

SEQ ID NO: 69430 - DNA, 22 bp, synthetic construct
  misc_feature 1..22: note = chemically synthesized
  source 1..22: mol_type = other DNA
gaaagcgaacacggaagtcccc

SEQ ID NO: 69431 - DNA, 22 bp, synthetic construct
  misc_feature 1..22: note = chemically synthesized
  source 1..22: mol_type = other DNA
accccgcgggttggtatccctt

SEQ ID NO: 69432 - DNA, 22 bp, synthetic construct
  misc_feature 1..22: note = chemically synthesized
  source 1..22: mol_type = other DNA
gtatcccttcaggactaggtgc

SEQ ID NO: 69433 - DNA, 22 bp, synthetic construct
  misc_feature 1..22: note = chemically synthesized
  source 1..22: mol_type = other DNA
caggactaggtgcagaatgtcc

SEQ ID NO: 69434 - DNA, 22 bp, synthetic construct
  misc_feature 1..22: note = chemically synthesized
  source 1..22: mol_type = other DNA
aggactaggtgcagaatgtcct

SEQ ID NO: 69435 - DNA, 22 bp, synthetic construct
  misc_feature 1..22: note = chemically synthesized
  source 1..22: mol_type = other DNA
ggtgcagaatgtccttcccagc

SEQ ID NO: 69436 - DNA, 22 bp, synthetic construct
  misc_feature 1..22: note = chemically synthesized
  source 1..22: mol_type = other DNA
cccagccacctctccatgggat

SEQ ID NO: 69437 - DNA, 22 bp, synthetic construct
  misc_feature 1..22: note = chemically synthesized
  source 1..22: mol_type = other DNA
ccagccacctctccatgggatt

SEQ ID NO: 69438 - DNA, 22 bp, synthetic construct
  misc_feature 1..22: note = chemically synthesized
  source 1..22: mol_type = other DNA
tccatgggattcatattgcaga

SEQ ID NO: 69439 - DNA, 22 bp, synthetic construct
  misc_feature 1..22: note = chemically synthesized
  source 1..22: mol_type = other DNA
catgggattcatattgcagaca

SEQ ID NO: 69440 - DNA, 22 bp, synthetic construct
  misc_feature 1..22: note = chemically synthesized
  source 1..22: mol_type = other DNA
atattgcagacaataacccctt

SEQ ID NO: 69441 - DNA, 22 bp, synthetic construct
  misc_feature 1..22: note = chemically synthesized
  source 1..22: mol_type = other DNA
cagacaataacccctttaacct

SEQ ID NO: 69442 - DNA, 22 bp, synthetic construct
  misc_feature 1..22: note = chemically synthesized
  source 1..22: mol_type = other DNA
taacctgctaagaataccagga

SEQ ID NO: 69443 - DNA, 22 bp, synthetic construct
  misc_feature 1..22: note = chemically synthesized
  source 1..22: mol_type = other DNA
aacctgctaagaataccaggat

SEQ ID NO: 69444 - DNA, 22 bp, synthetic construct
  misc_feature 1..22: note = chemically synthesized
  source 1..22: mol_type = other DNA
acctgctaagaataccaggatc

SEQ ID NO: 69445 - DNA, 22 bp, synthetic construct
  misc_feature 1..22: note = chemically synthesized
  source 1..22: mol_type = other DNA
ctaagaataccaggatcagtat

SEQ ID NO: 69446 - DNA, 22 bp, synthetic construct
  misc_feature 1..22: note = chemically synthesized
  source 1..22: mol_type = other DNA
agaataccaggatcagtatcga

SEQ ID NO: 69447 - DNA, 22 bp, synthetic construct
  misc_feature 1..22: note = chemically synthesized
  source 1..22: mol_type = other DNA
ccggcctggcagaagggcgctt

SEQ ID NO: 69448 - DNA, 22 bp, synthetic construct
  misc_feature 1..22: note = chemically synthesized
  source 1..22: mol_type = other DNA
cggcctggcagaagggcgcttt

SEQ ID NO: 69449 - DNA, 22 bp, synthetic construct
  misc_feature 1..22: note = chemically synthesized
  source 1..22: mol_type = other DNA
gcagaagggcgctttccaccca

SEQ ID NO: 69450 - DNA, 22 bp, synthetic construct
  misc_feature 1..22: note = chemically synthesized
  source 1..22: mol_type = other DNA
tccacccactccccccctgttt

SEQ ID NO: 69451 - DNA, 22 bp, synthetic construct
  misc_feature 1..22: note = chemically synthesized
  source 1..22: mol_type = other DNA
ccacccactccccccctgttta

SEQ ID NO: 69452 - DNA, 22 bp, synthetic construct
  misc_feature 1..22: note = chemically synthesized
  source 1..22: mol_type = other DNA
cacccactccccccctgtttag

SEQ ID NO: 69453 - DNA, 22 bp, synthetic construct
  misc_feature 1..22: note = chemically synthesized
  source 1..22: mol_type = other DNA
cccccctgtttagtccaccacc

SEQ ID NO: 69454 - DNA, 22 bp, synthetic construct
  misc_feature 1..22: note = chemically synthesized
  source 1..22: mol_type = other DNA
tttagtccaccaccgagacatc

SEQ ID NO: 69455 - DNA, 22 bp, synthetic construct
  misc_feature 1..22: note = chemically synthesized
  source 1..22: mol_type = other DNA
agtccaccaccgagacatcact

SEQ ID NO: 69456 - DNA, 22 bp, synthetic construct
  misc_feature 1..22: note = chemically synthesized
  source 1..22: mol_type = other DNA
gtccaccaccgagacatcactt

SEQ ID NO: 69457 - DNA, 22 bp, synthetic construct
  misc_feature 1..22: note = chemically synthesized
  source 1..22: mol_type = other DNA
ggacccccaccgcatagagcgc

SEQ ID NO: 69458 - DNA, 22 bp, synthetic construct
  misc_feature 1..22: note = chemically synthesized
  source 1..22: mol_type = other DNA
gacccccaccgcatagagcgcc

SEQ ID NO: 69459 - DNA, 22 bp, synthetic construct
  misc_feature 1..22: note = chemically synthesized
  source 1..22: mol_type = other DNA
ggggcggaagagatggccctgg

SEQ ID NO: 69460 - DNA, 22 bp, synthetic construct
  misc_feature 1..22: note = chemically synthesized
  source 1..22: mol_type = other DNA
gccacccatcacccgagtgcct

SEQ ID NO: 69461 - DNA, 22 bp, synthetic construct
  misc_feature 1..22: note = chemically synthesized
  source 1..22: mol_type = other DNA
tgacagggtgctgcggttgaat

SEQ ID NO: 69462 - DNA, 22 bp, synthetic construct
  misc_feature 1..22: note = chemically synthesized
  source 1..22: mol_type = other DNA
gacagggtgctgcggttgaatc

SEQ ID NO: 69463 - DNA, 22 bp, synthetic construct
  misc_feature 1..22: note = chemically synthesized
  source 1..22: mol_type = other DNA
acagggtgctgcggttgaatcc

SEQ ID NO: 69464 - DNA, 22 bp, synthetic construct
  misc_feature 1..22: note = chemically synthesized
  source 1..22: mol_type = other DNA
cggttgaatccaatggctatgg

SEQ ID NO: 69465 - DNA, 22 bp, synthetic construct
  misc_feature 1..22: note = chemically synthesized
  source 1..22: mol_type = other DNA
aatccaatggctatggagcctc

SEQ ID NO: 69466 - DNA, 22 bp, synthetic construct
  misc_feature 1..22: note = chemically synthesized
  source 1..22: mol_type = other DNA
tggagcctcccgccatggattt

SEQ ID NO: 69467 - DNA, 22 bp, synthetic construct
  misc_feature 1..22: note = chemically synthesized
  source 1..22: mol_type = other DNA
ccgccatggatttctctaggag

SEQ ID NO: 69468 - DNA, 22 bp, synthetic construct
  misc_feature 1..22: note = chemically synthesized
  source 1..22: mol_type = other DNA
ctctaggagacttagagagctg

SEQ ID NO: 69469 - DNA, 22 bp, synthetic construct
  misc_feature 1..22: note = chemically synthesized
  source 1..22: mol_type = other DNA
tctaggagacttagagagctgg

SEQ ID NO: 69470 - DNA, 22 bp, synthetic construct
  misc_feature 1..22: note = chemically synthesized
  source 1..22: mol_type = other DNA
taggagacttagagagctggca

SEQ ID NO: 69471 - DNA, 22 bp, synthetic construct
  misc_feature 1..22: note = chemically synthesized
  source 1..22: mol_type = other DNA
ggagacttagagagctggcagg

SEQ ID NO: 69472 - DNA, 22 bp, synthetic construct
  misc_feature 1..22: note = chemically synthesized
  source 1..22: mol_type = other DNA
agagagctggcagggaacacgt

SEQ ID NO: 69473 - DNA, 22 bp, synthetic construct
  misc_feature 1..22: note = chemically synthesized
  source 1..22: mol_type = other DNA
gagagctggcagggaacacgtc

SEQ ID NO: 69474 - DNA, 22 bp, synthetic construct
  misc_feature 1..22: note = chemically synthesized
  source 1..22: mol_type = other DNA
gcagggaacacgtctagcccac

SEQ ID NO: 69475 - DNA, 22 bp, synthetic construct
  misc_feature 1..22: note = chemically synthesized
  source 1..22: mol_type = other DNA
gcccaccgctgtccccaggccg

SEQ ID NO: 69476 - DNA, 22 bp, synthetic construct
  misc_feature 1..22: note = chemically synthesized
  source 1..22: mol_type = other DNA
tccccaggccggcccagcccta

SEQ ID NO: 69477 - DNA, 22 bp, synthetic construct
  misc_feature 1..22: note = chemically synthesized
  source 1..22: mol_type = other DNA
tgcaaaggttactgcaaccatt

SEQ ID NO: 69478 - DNA, 22 bp, synthetic construct
  misc_feature 1..22: note = chemically synthesized
  source 1..22: mol_type = other DNA
ctgcaaccattccagccaggta

SEQ ID NO: 69479 - DNA, 22 bp, synthetic construct
  misc_feature 1..22: note = chemically synthesized
  source 1..22: mol_type = other DNA
caaccattccagccaggtagca

SEQ ID NO: 69480 - DNA, 22 bp, synthetic construct
  misc_feature 1..22: note = chemically synthesized
  source 1..22: mol_type = other DNA
cagccaggtagcaagccgccct

SEQ ID NO: 69481 - DNA, 22 bp, synthetic construct
  misc_feature 1..22: note = chemically synthesized
  source 1..22: mol_type = other DNA
cctggcgacgccccccctccct

SEQ ID NO: 69482 - DNA, 22 bp, synthetic construct
  misc_feature 1..22: note = chemically synthesized
  source 1..22: mol_type = other DNA
ctggcgacgccccccctccctc

SEQ ID NO: 69483 - DNA, 22 bp, synthetic construct
  misc_feature 1..22: note = chemically synthesized
  source 1..22: mol_type = other DNA
gcgacgccccccctccctcctc

SEQ ID NO: 69484 - DNA, 22 bp, synthetic construct
  misc_feature 1..22: note = chemically synthesized
  source 1..22: mol_type = other DNA
cctcctctgcaatccgcccctc

SEQ ID NO: 69485 - DNA, 22 bp, synthetic construct
  misc_feature 1..22: note = chemically synthesized
  source 1..22: mol_type = other DNA
ctctgcaatccgcccctcctcc

SEQ ID NO: 69486 - DNA, 22 bp, synthetic construct
  misc_feature 1..22: note = chemically synthesized
  source 1..22: mol_type = other DNA
tgcaatccgcccctcctccctc

SEQ ID NO: 69487 - DNA, 22 bp, synthetic construct
  misc_feature 1..22: note = chemically synthesized
  source 1..22: mol_type = other DNA
caatccgcccctcctccctccc

SEQ ID NO: 69488 - DNA, 22 bp, synthetic construct
  misc_feature 1..22: note = chemically synthesized
  source 1..22: mol_type = other DNA
ctccctcccagcccccggtcaa

SEQ ID NO: 69489 - DNA, 22 bp, synthetic construct
  misc_feature 1..22: note = chemically synthesized
  source 1..22: mol_type = other DNA
cctcccagcccccggtcaagtc

SEQ ID NO: 69490 - DNA, 22 bp, synthetic construct
  misc_feature 1..22: note = chemically synthesized
  source 1..22: mol_type = other DNA
ccagcccccggtcaagtccaag

SEQ ID NO: 69491 - DNA, 22 bp, synthetic construct
  misc_feature 1..22: note = chemically synthesized
  source 1..22: mol_type = other DNA
tgcggcaagacgttcaaatttc

SEQ ID NO: 69492 - DNA, 22 bp, synthetic construct
  misc_feature 1..22: note = chemically synthesized
  source 1..22: mol_type = other DNA
cggcaagacgttcaaatttcag

SEQ ID NO: 69493 - DNA, 22 bp, synthetic construct
  misc_feature 1..22: note = chemically synthesized
  source 1..22: mol_type = other DNA
aaatttcagagcaacctggtgg

SEQ ID NO: 69494 - DNA, 22 bp, synthetic construct
  misc_feature 1..22: note = chemically synthesized
  source 1..22: mol_type = other DNA
cagagcaacctggtggtgcacc

SEQ ID NO: 69495 - DNA, 22 bp, synthetic construct
  misc_feature 1..22: note = chemically synthesized
  source 1..22: mol_type = other DNA
agagcaacctggtggtgcaccg

SEQ ID NO: 69496 - DNA, 22 bp, synthetic construct
  misc_feature 1..22: note = chemically synthesized
  source 1..22: mol_type = other DNA
gtggtgcaccggcgcagccaca

SEQ ID NO: 69497 - DNA, 22 bp, synthetic construct
  misc_feature 1..22: note = chemically synthesized
  source 1..22: mol_type = other DNA
caagtgcaacctgtgcgaccac

SEQ ID NO: 69498 - DNA, 22 bp, synthetic construct
  misc_feature 1..22: note = chemically synthesized
  source 1..22: mol_type = other DNA
tgcgaccacgcgtgcacccagg

SEQ ID NO: 69499 - DNA, 22 bp, synthetic construct
  misc_feature 1..22: note = chemically synthesized
  source 1..22: mol_type = other DNA
aagcgccacatgaagacgcaca

SEQ ID NO: 69500 - DNA, 22 bp, synthetic construct
  misc_feature 1..22: note = chemically synthesized
  source 1..22: mol_type = other DNA
tccaccgccagctccccggaac

SEQ ID NO: 69501 - DNA, 22 bp, synthetic construct
  misc_feature 1..22: note = chemically synthesized
  source 1..22: mol_type = other DNA
caccgccagctccccggaaccc

SEQ ID NO: 69502 - DNA, 22 bp, synthetic construct
  misc_feature 1..22: note = chemically synthesized
  source 1..22: mol_type = other DNA
cccggaacccggcaccagcgac

SEQ ID NO: 69503 - DNA, 22 bp, synthetic construct
  misc_feature 1..22: note = chemically synthesized
  source 1..22: mol_type = other DNA
ggtgggcagcgccagcagcgcg

SEQ ID NO: 69504 - DNA, 22 bp, synthetic construct
  misc_feature 1..22: note = chemically synthesized
  source 1..22: mol_type = other DNA
gtgggcagcgccagcagcgcgc

SEQ ID NO: 69505 - DNA, 22 bp, synthetic construct
  misc_feature 1..22: note = chemically synthesized
  source 1..22: mol_type = other DNA
aagtccgtggtggccaagttca

SEQ ID NO: 69506 - DNA, 22 bp, synthetic construct
  misc_feature 1..22: note = chemically synthesized
  source 1..22: mol_type = other DNA
aagagcgagaacgaccccaacc

SEQ ID NO: 69507 - DNA, 22 bp, synthetic construct
  misc_feature 1..22: note = chemically synthesized
  source 1..22: mol_type = other DNA
atcccggagaacggggacgagg

SEQ ID NO: 69508 - DNA, 22 bp, synthetic construct
  misc_feature 1..22: note = chemically synthesized
  source 1..22: mol_type = other DNA
acggagagcgagagggtggact

SEQ ID NO: 69509 - DNA, 22 bp, synthetic construct
  misc_feature 1..22: note = chemically synthesized
  source 1..22: mol_type = other DNA
cggcttcgggctgagcctggag

SEQ ID NO: 69510 - DNA, 22 bp, synthetic construct
  misc_feature 1..22: note = chemically synthesized
  source 1..22: mol_type = other DNA
cgggctgagcctggaggcggcg

SEQ ID NO: 69511 - DNA, 22 bp, synthetic construct
  misc_feature 1..22: note = chemically synthesized
  source 1..22: mol_type = other DNA
gggctgagcctggaggcggcgc

SEQ ID NO: 69512 - DNA, 22 bp, synthetic construct
  misc_feature 1..22: note = chemically synthesized
  source 1..22: mol_type = other DNA
agcctggaggcggcgcgccacc

SEQ ID NO: 69513 - DNA, 22 bp, synthetic construct
  misc_feature 1..22: note = chemically synthesized
  source 1..22: mol_type = other DNA
gaggcggcgcgccaccacgaga

SEQ ID NO: 69514 - DNA, 22 bp, synthetic construct
  misc_feature 1..22: note = chemically synthesized
  source 1..22: mol_type = other DNA
gcggggcgcggtcgtgggcgtg

SEQ ID NO: 69515 - DNA, 22 bp, synthetic construct
  misc_feature 1..22: note = chemically synthesized
  source 1..22: mol_type = other DNA
cccgacgtcatgcagggcatgg

SEQ ID NO: 69516 - DNA, 22 bp, synthetic construct
  misc_feature 1..22: note = chemically synthesized
  source 1..22: mol_type = other DNA
agctccatgcagcacttcagcg

SEQ ID NO: 69517 - DNA, 22 bp, synthetic construct
  misc_feature 1..22: note = chemically synthesized
  source 1..22: mol_type = other DNA
catgcagcacttcagcgaggcc

SEQ ID NO: 69518 - DNA, 22 bp, synthetic construct
  misc_feature 1..22: note = chemically synthesized
  source 1..22: mol_type = other DNA
cagcgaggccttccaccaggtc

SEQ ID NO: 69519 - DNA, 22 bp, synthetic construct
  misc_feature 1..22: note = chemically synthesized
  source 1..22: mol_type = other DNA
agcgaggccttccaccaggtcc

SEQ ID NO: 69520 - DNA, 22 bp, synthetic construct
  misc_feature 1..22: note = chemically synthesized
  source 1..22: mol_type = other DNA
ccaccaggtcctgggcgagaag

SEQ ID NO: 69521 - DNA, 22 bp, synthetic construct
  misc_feature 1..22: note = chemically synthesized
  source 1..22: mol_type = other DNA
caccaggtcctgggcgagaagc

SEQ ID NO: 69522 - DNA, 22 bp, synthetic construct
  misc_feature 1..22: note = chemically synthesized
  source 1..22: mol_type = other DNA
ggcgagaagcataagcgcggcc

SEQ ID NO: 69523 - DNA, 22 bp, synthetic construct
  misc_feature 1..22: note = chemically synthesized
  source 1..22: mol_type = other DNA
gccgaggccgagggccacaggg

SEQ ID NO: 69524 - DNA, 22 bp, synthetic construct
  misc_feature 1..22: note = chemically synthesized
  source 1..22: mol_type = other DNA
gcgacgaagactcggtggccgg

SEQ ID NO: 69525 - DNA, 22 bp, synthetic construct
  misc_feature 1..22: note = chemically synthesized
  source 1..22: mol_type = other DNA
cgacgaagactcggtggccggc

SEQ ID NO: 69526 - DNA, 22 bp, synthetic construct
  misc_feature 1..22: note = chemically synthesized
  source 1..22: mol_type = other DNA
ggtggccggcgagtcggaccgc

SEQ ID NO: 69527 - DNA, 22 bp, synthetic construct
  misc_feature 1..22: note = chemically synthesized
  source 1..22: mol_type = other DNA
ttaatggccgcggctgctcccc

SEQ ID NO: 69528 - DNA, 22 bp, synthetic construct
  misc_feature 1..22: note = chemically synthesized
  source 1..22: mol_type = other DNA
atggccgcggctgctccccggg

SEQ ID NO: 69529 - DNA, 22 bp, synthetic construct
  misc_feature 1..22: note = chemically synthesized
  source 1..22: mol_type = other DNA
ctccccgggcgagtcggcctcg

SEQ ID NO: 69530 - DNA, 22 bp, synthetic construct
  misc_feature 1..22: note = chemically synthesized
  source 1..22: mol_type = other DNA
cccgggcgagtcggcctcgggg

SEQ ID NO: 69531 - DNA, 22 bp, synthetic construct
  misc_feature 1..22: note = chemically synthesized
  source 1..22: mol_type = other DNA
ggggggcctgtccaaaaagctg

SEQ ID NO: 69532 - DNA, 22 bp, synthetic construct
  misc_feature 1..22: note = chemically synthesized
  source 1..22: mol_type = other DNA
tccaaaaagctgctgctgggca

SEQ ID NO: 69533 - DNA, 22 bp, synthetic construct
  misc_feature 1..22: note = chemically synthesized
  source 1..22: mol_type = other DNA
ctgctgggcagccccagctcgc

SEQ ID NO: 69534 - DNA, 22 bp, synthetic construct
  misc_feature 1..22: note = chemically synthesized
  source 1..22: mol_type = other DNA
ctgggcagccccagctcgctga

SEQ ID NO: 69535 - DNA, 22 bp, synthetic construct
  misc_feature 1..22: note = chemically synthesized
  source 1..22: mol_type = other DNA
ggcagccccagctcgctgagcc

SEQ ID NO: 69536 - DNA, 22 bp, synthetic construct
  misc_feature 1..22: note = chemically synthesized
  source 1..22: mol_type = other DNA
gctgagccccttctctaagcgc

SEQ ID NO: 69537 - DNA, 22 bp, synthetic construct
  misc_feature 1..22: note = chemically synthesized
  source 1..22: mol_type = other DNA
agccccttctctaagcgcatca

SEQ ID NO: 69538 - DNA, 22 bp, synthetic construct
  misc_feature 1..22: note = chemically synthesized
  source 1..22: mol_type = other DNA
ctctaagcgcatcaagctcgag

SEQ ID NO: 69539 - DNA, 22 bp, synthetic construct
  misc_feature 1..22: note = chemically synthesized
  source 1..22: mol_type = other DNA
tctaagcgcatcaagctcgaga

SEQ ID NO: 69540 - DNA, 22 bp, synthetic construct
  misc_feature 1..22: note = chemically synthesized
  source 1..22: mol_type = other DNA
taagcgcatcaagctcgagaag

SEQ ID NO: 69541 - DNA, 22 bp, synthetic construct
  misc_feature 1..22: note = chemically synthesized
  source 1..22: mol_type = other DNA
agcgcatcaagctcgagaagga

SEQ ID NO: 69542 - DNA, 22 bp, synthetic construct
  misc_feature 1..22: note = chemically synthesized
  source 1..22: mol_type = other DNA
gagaaggagttcgacctgcccc

SEQ ID NO: 69543 - DNA, 22 bp, synthetic construct
  misc_feature 1..22: note = chemically synthesized
  source 1..22: mol_type = other DNA
gacctgcccccggccgcgatgc

SEQ ID NO: 69544 - DNA, 22 bp, synthetic construct
  misc_feature 1..22: note = chemically synthesized
  source 1..22: mol_type = other DNA
cccccggccgcgatgcccaaca

SEQ ID NO: 69545 - DNA, 22 bp, synthetic construct
  misc_feature 1..22: note = chemically synthesized
  source 1..22: mol_type = other DNA
gcagtggctcgccggctacgcg

SEQ ID NO: 69546 - DNA, 22 bp, synthetic construct
  misc_feature 1..22: note = chemically synthesized
  source 1..22: mol_type = other DNA
gccggctacgcggcctccaggc

SEQ ID NO: 69547 - DNA, 22 bp, synthetic construct
  misc_feature 1..22: note = chemically synthesized
  source 1..22: mol_type = other DNA
cgcggcctccaggcagctcaaa

SEQ ID NO: 69548 - DNA, 22 bp, synthetic construct
  misc_feature 1..22: note = chemically synthesized
  source 1..22: mol_type = other DNA
caggcagctcaaagatcccttc

SEQ ID NO: 69549 - DNA, 22 bp, synthetic construct
  misc_feature 1..22: note = chemically synthesized
  source 1..22: mol_type = other DNA
aaagatcccttccttagcttcg

SEQ ID NO: 69550 - DNA, 22 bp, synthetic construct
  misc_feature 1..22: note = chemically synthesized
  source 1..22: mol_type = other DNA
ccttagcttcggagactccaga

SEQ ID NO: 69551 - DNA, 22 bp, synthetic construct
  misc_feature 1..22: note = chemically synthesized
  source 1..22: mol_type = other DNA
cttagcttcggagactccagac

SEQ ID NO: 69552 - DNA, 22 bp, synthetic construct
  misc_feature 1..22: note = chemically synthesized
  source 1..22: mol_type = other DNA
agcttcggagactccagacaat

SEQ ID NO: 69553 - DNA, 22 bp, synthetic construct
  misc_feature 1..22: note = chemically synthesized
  source 1..22: mol_type = other DNA
gcttcggagactccagacaatc

SEQ ID NO: 69554 - DNA, 22 bp, synthetic construct
  misc_feature 1..22: note = chemically synthesized
  source 1..22: mol_type = other DNA
cggagactccagacaatcgcct

SEQ ID NO: 69555 - DNA, 22 bp, synthetic construct
  misc_feature 1..22: note = chemically synthesized
  source 1..22: mol_type = other DNA
ggagactccagacaatcgcctt

SEQ ID NO: 69556 - DNA, 22 bp, synthetic construct
  misc_feature 1..22: note = chemically synthesized
  source 1..22: mol_type = other DNA
cagacaatcgccttttgcctcc

SEQ ID NO: 69557 - DNA, 22 bp, synthetic construct
  misc_feature 1..22: note = chemically synthesized
  source 1..22: mol_type = other DNA
ttgcctcctcgtcggagcactc

SEQ ID NO: 69558 - DNA, 22 bp, synthetic construct
  misc_feature 1..22: note = chemically synthesized
  source 1..22: mol_type = other DNA
tgcctcctcgtcggagcactcc

SEQ ID NO: 69559 - DNA, 22 bp, synthetic construct
  misc_feature 1..22: note = chemically synthesized
  source 1..22: mol_type = other DNA
gcctcctcgtcggagcactcct

SEQ ID NO: 69560 - DNA, 22 bp, synthetic construct
  misc_feature 1..22: note = chemically synthesized
  source 1..22: mol_type = other DNA
cctcctcgtcggagcactcctc

SEQ ID NO: 69561 - DNA, 22 bp, synthetic construct
  misc_feature 1..22: note = chemically synthesized
  source 1..22: mol_type = other DNA
ctcgtcggagcactcctcggag

SEQ ID NO: 69562 - DNA, 22 bp, synthetic construct
  misc_feature 1..22: note = chemically synthesized
  source 1..22: mol_type = other DNA
gtcggagcactcctcggagaac

SEQ ID NO: 69563 - DNA, 22 bp, synthetic construct
  misc_feature 1..22: note = chemically synthesized
  source 1..22: mol_type = other DNA
ctcggagaacgggagtttgcgc

SEQ ID NO: 69564 - DNA, 22 bp, synthetic construct
  misc_feature 1..22: note = chemically synthesized
  source 1..22: mol_type = other DNA
ggagaacgggagtttgcgcttc

SEQ ID NO: 69565 - DNA, 22 bp, synthetic construct
  misc_feature 1..22: note = chemically synthesized
  source 1..22: mol_type = other DNA
gcgcttctccacaccgcccggg

SEQ ID NO: 69566 - DNA, 22 bp, synthetic construct
  misc_feature 1..22: note = chemically synthesized
  source 1..22: mol_type = other DNA
cgcttctccacaccgcccgggg

SEQ ID NO: 69567 - DNA, 22 bp, synthetic construct
  misc_feature 1..22: note = chemically synthesized
  source 1..22: mol_type = other DNA
ctccacaccgcccggggagctg

SEQ ID NO: 69568 - DNA, 22 bp, synthetic construct
  misc_feature 1..22: note = chemically synthesized
  source 1..22: mol_type = other DNA
tccacaccgcccggggagctgg

SEQ ID NO: 69569 - DNA, 22 bp, synthetic construct
  misc_feature 1..22: note = chemically synthesized
  source 1..22: mol_type = other DNA
cacaccgcccggggagctggac

SEQ ID NO: 69570 - DNA, 22 bp, synthetic construct
  misc_feature 1..22: note = chemically synthesized
  source 1..22: mol_type = other DNA
gacggagggatctcggggcgca

SEQ ID NO: 69571 - DNA, 22 bp, synthetic construct
  misc_feature 1..22: note = chemically synthesized
  source 1..22: mol_type = other DNA
ggggcgcagcggcacgggaagt

SEQ ID NO: 69572 - DNA, 22 bp, synthetic construct
  misc_feature 1..22: note = chemically synthesized
  source 1..22: mol_type = other DNA
gtggtccgggcccgggcaggcc

SEQ ID NO: 69573 - DNA, 22 bp, synthetic construct
  misc_feature 1..22: note = chemically synthesized
  source 1..22: mol_type = other DNA
aaaagagggcagacgcagcgac

SEQ ID NO: 69574 - DNA, 22 bp, synthetic construct
  misc_feature 1..22: note = chemically synthesized
  source 1..22: mol_type = other DNA
gtgagtactgtgggaaagtctt

SEQ ID NO: 69575 - DNA, 22 bp, synthetic construct
  misc_feature 1..22: note = chemically synthesized
  source 1..22: mol_type = other DNA
tgagtactgtgggaaagtcttc

SEQ ID NO: 69576 - DNA, 22 bp, synthetic construct
  misc_feature 1..22: note = chemically synthesized
  source 1..22: mol_type = other DNA
tgggaaagtcttcaagaactgt

SEQ ID NO: 69577 - DNA, 22 bp, synthetic construct
  misc_feature 1..22: note = chemically synthesized
  source 1..22: mol_type = other DNA
caagaactgtagcaatctcact

SEQ ID NO: 69578 - DNA, 22 bp, synthetic construct
  misc_feature 1..22: note = chemically synthesized
  source 1..22: mol_type = other DNA
aagaactgtagcaatctcactg

SEQ ID NO: 69579 - DNA, 22 bp, synthetic construct
  misc_feature 1..22: note = chemically synthesized
  source 1..22: mol_type = other DNA
tagcaatctcactgtccacagg

SEQ ID NO: 69580 - DNA, 22 bp, synthetic construct
  misc_feature 1..22: note = chemically synthesized
  source 1..22: mol_type = other DNA
actgtccacaggagaagccaca

SEQ ID NO: 69581 - DNA, 22 bp, synthetic construct
  misc_feature 1..22: note = chemically synthesized
  source 1..22: mol_type = other DNA
tccacaggagaagccacacggg

SEQ ID NO: 69582 - DNA, 22 bp, synthetic construct
  misc_feature 1..22: note = chemically synthesized
  source 1..22: mol_type = other DNA
ataaatgcgagctgtgcaacta

SEQ ID NO: 69583 - DNA, 22 bp, synthetic construct
  misc_feature 1..22: note = chemically synthesized
  source 1..22: mol_type = other DNA
taaatgcgagctgtgcaactat

SEQ ID NO: 69584 - DNA, 22 bp, synthetic construct
  misc_feature 1..22: note = chemically synthesized
  source 1..22: mol_type = other DNA
tgcaactatgcctgtgcccaga

SEQ ID NO: 69585 - DNA, 22 bp, synthetic construct
  misc_feature 1..22: note = chemically synthesized
  source 1..22: mol_type = other DNA
tgcctgtgcccagagtagcaag

SEQ ID NO: 69586 - DNA, 22 bp, synthetic construct
  misc_feature 1..22: note = chemically synthesized
  source 1..22: mol_type = other DNA
tgcccagagtagcaagctcacc

SEQ ID NO: 69587 - DNA, 22 bp, synthetic construct
  misc_feature 1..22: note = chemically synthesized
  source 1..22: mol_type = other DNA
accaggcacatgaaaacgcatg

SEQ ID NO: 69588 - DNA, 22 bp, synthetic construct
  misc_feature 1..22: note = chemically synthesized
  source 1..22: mol_type = other DNA
acaaatgtgaaatttgtaagat

SEQ ID NO: 69589 - DNA, 22 bp, synthetic construct
  misc_feature 1..22: note = chemically synthesized
  source 1..22: mol_type = other DNA
caaatgtgaaatttgtaagatg

SEQ ID NO: 69590 - DNA, 22 bp, synthetic construct
  misc_feature 1..22: note = chemically synthesized
  source 1..22: mol_type = other DNA
gtaagatgccttttagcgtgta

SEQ ID NO: 69591 - DNA, 22 bp, synthetic construct
  misc_feature 1..22: note = chemically synthesized
  source 1..22: mol_type = other DNA
taagatgccttttagcgtgtac

SEQ ID NO: 69592 - DNA, 22 bp, synthetic construct
  misc_feature 1..22: note = chemically synthesized
  source 1..22: mol_type = other DNA
ttagcgtgtacagtaccctgga

SEQ ID NO: 69593 - DNA, 22 bp, synthetic construct
  misc_feature 1..22: note = chemically synthesized
  source 1..22: mol_type = other DNA
tagcgtgtacagtaccctggag

SEQ ID NO: 69594 - DNA, 22 bp, synthetic construct
  misc_feature 1..22: note = chemically synthesized
  source 1..22: mol_type = other DNA
agcgtgtacagtaccctggaga

SEQ ID NO: 69595 - DNA, 22 bp, synthetic construct
  misc_feature 1..22: note = chemically synthesized
  source 1..22: mol_type = other DNA
gcgtgtacagtaccctggagaa

SEQ ID NO: 69596 - DNA, 22 bp, synthetic construct
  misc_feature 1..22: note = chemically synthesized
  source 1..22: mol_type = other DNA
gagaaacacatgaaaaaatggc

SEQ ID NO: 69597 - DNA, 22 bp, synthetic construct
  misc_feature 1..22: note = chemically synthesized
  source 1..22: mol_type = other DNA
aataatgatataaaaactgaat

SEQ ID NO: 69598 - DNA, 22 bp, synthetic construct
  misc_feature 1..22: note = chemically synthesized
  source 1..22: mol_type = other DNA
aatagaggtatattaatacccc

SEQ ID NO: 69599 - DNA, 22 bp, synthetic construct
  misc_feature 1..22: note = chemically synthesized
  source 1..22: mol_type = other DNA
atacccctccctcactcccacc

SEQ ID NO: 69600 - DNA, 22 bp, synthetic construct
  misc_feature 1..22: note = chemically synthesized
  source 1..22: mol_type = other DNA
cctcactcccacctgacacccc

SEQ ID NO: 69601 - DNA, 22 bp, synthetic construct
  misc_feature 1..22: note = chemically synthesized
  source 1..22: mol_type = other DNA
actcccacctgacacccccttt

SEQ ID NO: 69602 - DNA, 22 bp, synthetic construct
  misc_feature 1..22: note = chemically synthesized
  source 1..22: mol_type = other DNA
ccacctgacaccccctttttca

SEQ ID NO: 69603 - DNA, 22 bp, synthetic construct
  misc_feature 1..22: note = chemically synthesized
  source 1..22: mol_type = other DNA
acaccccctttttcaccactcc

SEQ ID NO: 69604 - DNA, 22 bp, synthetic construct
  misc_feature 1..22: note = chemically synthesized
  source 1..22: mol_type = other DNA
tttcaccactccccttccccat

SEQ ID NO: 69605 - DNA, 22 bp, synthetic construct
  misc_feature 1..22: note = chemically synthesized
  source 1..22: mol_type = other DNA
ttcaccactccccttccccatc

SEQ ID NO: 69606 - DNA, 22 bp, synthetic construct
  misc_feature 1..22: note = chemically synthesized
  source 1..22: mol_type = other DNA
tcaccactccccttccccatcg

SEQ ID NO: 69607 - DNA, 22 bp, synthetic construct
  misc_feature 1..22: note = chemically synthesized
  source 1..22: mol_type = other DNA
caccactccccttccccatcgc

SEQ ID NO: 69608 - DNA, 22 bp, synthetic construct
  misc_feature 1..22: note = chemically synthesized
  source 1..22: mol_type = other DNA
accactccccttccccatcgcc

SEQ ID NO: 69609 - DNA, 22 bp, synthetic construct
  misc_feature 1..22: note = chemically synthesized
  source 1..22: mol_type = other DNA
cccttccccatcgccctccagc

SEQ ID NO: 69610 - DNA, 22 bp, synthetic construct
  misc_feature 1..22: note = chemically synthesized
  source 1..22: mol_type = other DNA
ccccatcgccctccagccccac

SEQ ID NO: 69611 - DNA, 22 bp, synthetic construct
  misc_feature 1..22: note = chemically synthesized
  source 1..22: mol_type = other DNA
cccatcgccctccagccccact

SEQ ID NO: 69612 - DNA, 22 bp, synthetic construct
  misc_feature 1..22: note = chemically synthesized
  source 1..22: mol_type = other DNA
cagccccactccctgtaggatt

SEQ ID NO: 69613 - DNA, 22 bp, synthetic construct
  misc_feature 1..22: note = chemically synthesized
  source 1..22: mol_type = other DNA
cctgtaggatttttttctagtc

SEQ ID NO: 69614 - DNA, 22 bp, synthetic construct
  misc_feature 1..22: note = chemically synthesized
  source 1..22: mol_type = other DNA
taggatttttttctagtcccat

SEQ ID NO: 69615 - DNA, 22 bp, synthetic construct
  misc_feature 1..22: note = chemically synthesized
  source 1..22: mol_type = other DNA
ttttctagtcccatgtgattta

SEQ ID NO: 69616 - DNA, 22 bp, synthetic construct
  misc_feature 1..22: note = chemically synthesized
  source 1..22: mol_type = other DNA
tttctagtcccatgtgatttaa

SEQ ID NO: 69617 - DNA, 22 bp, synthetic construct
  misc_feature 1..22: note = chemically synthesized
  source 1..22: mol_type = other DNA
ttctagtcccatgtgatttaaa

SEQ ID NO: 69618 - DNA, 22 bp, synthetic construct
  misc_feature 1..22: note = chemically synthesized
  source 1..22: mol_type = other DNA
tctagtcccatgtgatttaaac

SEQ ID NO: 69619 - DNA, 22 bp, synthetic construct
  misc_feature 1..22: note = chemically synthesized
  source 1..22: mol_type = other DNA
ctagtcccatgtgatttaaaca

SEQ ID NO: 69620 - DNA, 22 bp, synthetic construct
  misc_feature 1..22: note = chemically synthesized
  source 1..22: mol_type = other DNA
tagtcccatgtgatttaaacaa

SEQ ID NO: 69621 - DNA, 22 bp, synthetic construct
  misc_feature 1..22: note = chemically synthesized
  source 1..22: mol_type = other DNA
gtcccatgtgatttaaacaaac

SEQ ID NO: 69622 - DNA, 22 bp, synthetic construct
  misc_feature 1..22: note = chemically synthesized
  source 1..22: mol_type = other DNA
aaacaaacaaacaaacaaacag

SEQ ID NO: 69623 - DNA, 22 bp, synthetic construct
  misc_feature 1..22: note = chemically synthesized
  source 1..22: mol_type = other DNA
aacaaacaaacaaacaaacaga

SEQ ID NO: 69624 - DNA, 22 bp, synthetic construct
  misc_feature 1..22: note = chemically synthesized
  source 1..22: mol_type = other DNA
agaatatgagagtgcttgtcac

SEQ ID NO: 69625 - DNA, 22 bp, synthetic construct
  misc_feature 1..22: note = chemically synthesized
  source 1..22: mol_type = other DNA
gtcaccagcacacctgtttttt

SEQ ID NO: 69626 - DNA, 22 bp, synthetic construct
  misc_feature 1..22: note = chemically synthesized
  source 1..22: mol_type = other DNA
tcaccagcacacctgttttttt

SEQ ID NO: 69627 - DNA, 22 bp, synthetic construct
  misc_feature 1..22: note = chemically synthesized
  source 1..22: mol_type = other DNA
ttttttttctttttctttttct

SEQ ID NO: 69628 - DNA, 22 bp, synthetic construct
  misc_feature 1..22: note = chemically synthesized
  source 1..22: mol_type = other DNA
tttttctttttctttttctttt

SEQ ID NO: 69629 - DNA, 22 bp, synthetic construct
  misc_feature 1..22: note = chemically synthesized
  source 1..22: mol_type = other DNA
ttttctttttctttttcttttt

SEQ ID NO: 69630 - DNA, 22 bp, synthetic construct
  misc_feature 1..22: note = chemically synthesized
  source 1..22: mol_type = other DNA
tttctttttctttttctttttt

SEQ ID NO: 69631 - DNA, 22 bp, synthetic construct
  misc_feature 1..22: note = chemically synthesized
  source 1..22: mol_type = other DNA
ttctttttctttttcttttttc

SEQ ID NO: 69632 - DNA, 22 bp, synthetic construct
  misc_feature 1..22: note = chemically synthesized
  source 1..22: mol_type = other DNA
tctttttctttttcttttttct

SEQ ID NO: 69633 - DNA, 22 bp, synthetic construct
  misc_feature 1..22: note = chemically synthesized
  source 1..22: mol_type = other DNA
ctttttctttttcttttttctt

SEQ ID NO: 69634 - DNA, 22 bp, synthetic construct
  misc_feature 1..22: note = chemically synthesized
  source 1..22: mol_type = other DNA
tttttctttttcttttttcttt

SEQ ID NO: 69635 - DNA, 22 bp, synthetic construct
  misc_feature 1..22: note = chemically synthesized
  source 1..22: mol_type = other DNA
tttctttttcttttttcttttt

SEQ ID NO: 69636 - DNA, 22 bp, synthetic construct
  misc_feature 1..22: note = chemically synthesized
  source 1..22: mol_type = other DNA
ttctttttcttttttctttttc

SEQ ID NO: 69637 - DNA, 22 bp, synthetic construct
  misc_feature 1..22: note = chemically synthesized
  source 1..22: mol_type = other DNA
tctttttcttttttctttttcc

SEQ ID NO: 69638 - DNA, 22 bp, synthetic construct
  misc_feature 1..22: note = chemically synthesized
  source 1..22: mol_type = other DNA
ctttttcttttttctttttcct

SEQ ID NO: 69639 - DNA, 22 bp, synthetic construct
  misc_feature 1..22: note = chemically synthesized
  source 1..22: mol_type = other DNA
tttttcttttttctttttcctt

SEQ ID NO: 69640 - DNA, 22 bp, synthetic construct
  misc_feature 1..22: note = chemically synthesized
  source 1..22: mol_type = other DNA
tttcttttttctttttcctttt

SEQ ID NO: 69641 - DNA, 22 bp, synthetic construct
  misc_feature 1..22: note = chemically synthesized
  source 1..22: mol_type = other DNA
ttcttttttctttttccttttt

SEQ ID NO: 69642 - DNA, 22 bp, synthetic construct
  misc_feature 1..22: note = chemically synthesized
  source 1..22: mol_type = other DNA
tcttttttctttttcctttttt

SEQ ID NO: 69643 - DNA, 22 bp, synthetic construct
  misc_feature 1..22: note = chemically synthesized
  source 1..22: mol_type = other DNA
cttttttctttttccttttttt

SEQ ID NO: 69644 - DNA, 22 bp, synthetic construct
  misc_feature 1..22: note = chemically synthesized
  source 1..22: mol_type = other DNA
ttttttctttttcctttttttt

SEQ ID NO: 69645 - DNA, 22 bp, synthetic construct
  misc_feature 1..22: note = chemically synthesized
  source 1..22: mol_type = other DNA
ttttctttttcctttttttttt

SEQ ID NO: 69646 - DNA, 22 bp, synthetic construct
  misc_feature 1..22: note = chemically synthesized
  source 1..22: mol_type = other DNA
tttctttttccttttttttttt

SEQ ID NO: 69647 - DNA, 22 bp, synthetic construct
  misc_feature 1..22: note = chemically synthesized
  source 1..22: mol_type = other DNA
ttctttttcctttttttttttt

SEQ ID NO: 69648 - DNA, 22 bp, synthetic construct
  misc_feature 1..22: note = chemically synthesized
  source 1..22: mol_type = other DNA
tctttttccttttttttttttt

SEQ ID NO: 69649 - DNA, 22 bp, synthetic construct
  misc_feature 1..22: note = chemically synthesized
  source 1..22: mol_type = other DNA
ctttttcctttttttttttttt

SEQ ID NO: 69650 - DNA, 22 bp, synthetic construct
  misc_feature 1..22: note = chemically synthesized
  source 1..22: mol_type = other DNA
tttttccttttttttttttttc

SEQ ID NO: 69651 - DNA, 22 bp, synthetic construct
  misc_feature 1..22: note = chemically synthesized
  source 1..22: mol_type = other DNA
tttccttttttttttttttcct

SEQ ID NO: 69652 - DNA, 22 bp, synthetic construct
  misc_feature 1..22: note = chemically synthesized
  source 1..22: mol_type = other DNA
ttccttttttttttttttcctt

SEQ ID NO: 69653 - DNA, 22 bp, synthetic construct
  misc_feature 1..22: note = chemically synthesized
  source 1..22: mol_type = other DNA
tccttttttttttttttccttt

SEQ ID NO: 69654 - DNA, 22 bp, synthetic construct
  misc_feature 1..22: note = chemically synthesized
  source 1..22: mol_type = other DNA
ccttttttttttttttccttta

SEQ ID NO: 69655 - DNA, 22 bp, synthetic construct
  misc_feature 1..22: note = chemically synthesized
  source 1..22: mol_type = other DNA
cttttttttttttttcctttat

SEQ ID NO: 69656 - DNA, 22 bp, synthetic construct
  misc_feature 1..22: note = chemically synthesized
  source 1..22: mol_type = other DNA
ttttttttttttcctttatgtt

SEQ ID NO: 69657 - DNA, 22 bp, synthetic construct
  misc_feature 1..22: note = chemically synthesized
  source 1..22: mol_type = other DNA
tttttttttttcctttatgttc

SEQ ID NO: 69658 - DNA, 22 bp, synthetic construct
  misc_feature 1..22: note = chemically synthesized
  source 1..22: mol_type = other DNA
ttttttttttcctttatgttct

SEQ ID NO: 69659 - DNA, 22 bp, synthetic construct
  misc_feature 1..22: note = chemically synthesized
  source 1..22: mol_type = other DNA
tttttttttcctttatgttctc

SEQ ID NO: 69660 - DNA, 22 bp, synthetic construct
  misc_feature 1..22: note = chemically synthesized
  source 1..22: mol_type = other DNA
ttttttttcctttatgttctca

SEQ ID NO: 69661 - DNA, 22 bp, synthetic construct
  misc_feature 1..22: note = chemically synthesized
  source 1..22: mol_type = other DNA
tttttttcctttatgttctcac

SEQ ID NO: 69662 - DNA, 22 bp, synthetic construct
  misc_feature 1..22: note = chemically synthesized
  source 1..22: mol_type = other DNA
ttttttcctttatgttctcacc

SEQ ID NO: 69663 - DNA, 22 bp, synthetic construct
  misc_feature 1..22: note = chemically synthesized
  source 1..22: mol_type = other DNA
tttttcctttatgttctcaccg

SEQ ID NO: 69664 - DNA, 22 bp, synthetic construct
  misc_feature 1..22: note = chemically synthesized
  source 1..22: mol_type = other DNA
ttttcctttatgttctcaccgt

SEQ ID NO: 69665 - DNA, 22 bp, synthetic construct
  misc_feature 1..22: note = chemically synthesized
  source 1..22: mol_type = other DNA
tttcctttatgttctcaccgtt

SEQ ID NO: 69666 - DNA, 22 bp, synthetic construct
  misc_feature 1..22: note = chemically synthesized
  source 1..22: mol_type = other DNA
ttcctttatgttctcaccgttt

SEQ ID NO: 69667 - DNA, 22 bp, synthetic construct
  misc_feature 1..22: note = chemically synthesized
  source 1..22: mol_type = other DNA
tcctttatgttctcaccgtttg

SEQ ID NO: 69668 - DNA, 22 bp, synthetic construct
  misc_feature 1..22: note = chemically synthesized
  source 1..22: mol_type = other DNA
cctttatgttctcaccgtttga

SEQ ID NO: 69669 - DNA, 22 bp, synthetic construct
  misc_feature 1..22: note = chemically synthesized
  source 1..22: mol_type = other DNA
ctttatgttctcaccgtttgaa

SEQ ID NO: 69670 - DNA, 22 bp, synthetic construct
  misc_feature 1..22: note = chemically synthesized
  source 1..22: mol_type = other DNA
tatgttctcaccgtttgaatgc

SEQ ID NO: 69671 - DNA, 22 bp, synthetic construct
  misc_feature 1..22: note = chemically synthesized
  source 1..22: mol_type = other DNA
atgttctcaccgtttgaatgca

SEQ ID NO: 69672 - DNA, 22 bp, synthetic construct
  misc_feature 1..22: note = chemically synthesized
  source 1..22: mol_type = other DNA
tgttctcaccgtttgaatgcat

SEQ ID NO: 69673 - DNA, 22 bp, synthetic construct
  misc_feature 1..22: note = chemically synthesized
  source 1..22: mol_type = other DNA
tcaccgtttgaatgcatgatct

SEQ ID NO: 69674 - DNA, 22 bp, synthetic construct
  misc_feature 1..22: note = chemically synthesized
  source 1..22: mol_type = other DNA
accgtttgaatgcatgatctgt

SEQ ID NO: 69675 - DNA, 22 bp, synthetic construct
  misc_feature 1..22: note = chemically synthesized
  source 1..22: mol_type = other DNA
gaatgcatgatctgtatggggc

SEQ ID NO: 69676 - DNA, 22 bp, synthetic construct
  misc_feature 1..22: note = chemically synthesized
  source 1..22: mol_type = other DNA
aatgcatgatctgtatggggca

SEQ ID NO: 69677 - DNA, 22 bp, synthetic construct
  misc_feature 1..22: note = chemically synthesized
  source 1..22: mol_type = other DNA
tatggggcaatactattgcatt

SEQ ID NO: 69678 - DNA, 22 bp, synthetic construct
  misc_feature 1..22: note = chemically synthesized
  source 1..22: mol_type = other DNA
ttgcattttacgcaaactttga

SEQ ID NO: 69679 - DNA, 22 bp, synthetic construct
  misc_feature 1..22: note = chemically synthesized
  source 1..22: mol_type = other DNA
cattttacgcaaactttgagcc

SEQ ID NO: 69680 - DNA, 22 bp, synthetic construct
  misc_feature 1..22: note = chemically synthesized
  source 1..22: mol_type = other DNA
tacgcaaactttgagcctttct

SEQ ID NO: 69681 - DNA, 22 bp, synthetic construct
  misc_feature 1..22: note = chemically synthesized
  source 1..22: mol_type = other DNA
acgcaaactttgagcctttctc

SEQ ID NO: 69682 - DNA, 22 bp, synthetic construct
  misc_feature 1..22: note = chemically synthesized
  source 1..22: mol_type = other DNA
cgcaaactttgagcctttctct

SEQ ID NO: 69683 - DNA, 22 bp, synthetic construct
  misc_feature 1..22: note = chemically synthesized
  source 1..22: mol_type = other DNA
tgagcctttctcttgtgcaata

SEQ ID NO: 69684 - DNA, 22 bp, synthetic construct
  misc_feature 1..22: note = chemically synthesized
  source 1..22: mol_type = other DNA
gagcctttctcttgtgcaataa

SEQ ID NO: 69685 - DNA, 22 bp, synthetic construct
  misc_feature 1..22: note = chemically synthesized
  source 1..22: mol_type = other DNA
agcctttctcttgtgcaataat

SEQ ID NO: 69686 - DNA, 22 bp, synthetic construct
  misc_feature 1..22: note = chemically synthesized
  source 1..22: mol_type = other DNA
tctcttgtgcaataatttacat

SEQ ID NO: 69687 - DNA, 22 bp, synthetic construct
  misc_feature 1..22: note = chemically synthesized
  source 1..22: mol_type = other DNA
ctcttgtgcaataatttacatg

SEQ ID NO: 69688 - DNA, 22 bp, synthetic construct
  misc_feature 1..22: note = chemically synthesized
  source 1..22: mol_type = other DNA
tcttgtgcaataatttacatgt

SEQ ID NO: 69689 - DNA, 22 bp, synthetic construct
  misc_feature 1..22: note = chemically synthesized
  source 1..22: mol_type = other DNA
ttgtgcaataatttacatgttg

SEQ ID NO: 69690 - DNA, 22 bp, synthetic construct
  misc_feature 1..22: note = chemically synthesized
  source 1..22: mol_type = other DNA
gtgcaataatttacatgttgtg

SEQ ID NO: 69691 - DNA, 22 bp, synthetic construct
  misc_feature 1..22: note = chemically synthesized
  source 1..22: mol_type = other DNA
tgcaataatttacatgttgtgt

SEQ ID NO: 69692 - DNA, 22 bp, synthetic construct
  misc_feature 1..22: note = chemically synthesized
  source 1..22: mol_type = other DNA
acatgttgtgtatgtttttttt

SEQ ID NO: 69693 - DNA, 22 bp, synthetic construct
  misc_feature 1..22: note = chemically synthesized
  source 1..22: mol_type = other DNA
catgttgtgtatgttttttttt

SEQ ID NO: 69694 - DNA, 22 bp, synthetic construct
  misc_feature 1..22: note = chemically synthesized
  source 1..22: mol_type = other DNA
tgtatgtttttttttaaactta

SEQ ID NO: 69695 - DNA, 22 bp, synthetic construct
  misc_feature 1..22: note = chemically synthesized
  source 1..22: mol_type = other DNA
ttttttaaacttagacagcatg

SEQ ID NO: 69696 - DNA, 22 bp, synthetic construct
  misc_feature 1..22: note = chemically synthesized
  source 1..22: mol_type = other DNA
tttttaaacttagacagcatgt

SEQ ID NO: 69697 - DNA, 22 bp, synthetic construct
  misc_feature 1..22: note = chemically synthesized
  source 1..22: mol_type = other DNA
ttttaaacttagacagcatgta

SEQ ID NO: 69698 - DNA, 22 bp, synthetic construct
  misc_feature 1..22: note = chemically synthesized
  source 1..22: mol_type = other DNA
tttaaacttagacagcatgtat

SEQ ID NO: 69699 - DNA, 22 bp, synthetic construct
  misc_feature 1..22: note = chemically synthesized
  source 1..22: mol_type = other DNA
ttaaacttagacagcatgtatg

SEQ ID NO: 69700 - DNA, 22 bp, synthetic construct
  misc_feature 1..22: note = chemically synthesized
  source 1..22: mol_type = other DNA
taaacttagacagcatgtatgg

SEQ ID NO: 69701 - DNA, 22 bp, synthetic construct
  misc_feature 1..22: note = chemically synthesized
  source 1..22: mol_type = other DNA
aaacttagacagcatgtatggt

SEQ ID NO: 69702 - DNA, 22 bp, synthetic construct
  misc_feature 1..22: note = chemically synthesized
  source 1..22: mol_type = other DNA
aacttagacagcatgtatggta

SEQ ID NO: 69703 - DNA, 22 bp, synthetic construct
  misc_feature 1..22: note = chemically synthesized
  source 1..22: mol_type = other DNA
agacagcatgtatggtatgtta

SEQ ID NO: 69704 - DNA, 22 bp, synthetic construct
  misc_feature 1..22: note = chemically synthesized
  source 1..22: mol_type = other DNA
gacagcatgtatggtatgttat

SEQ ID NO: 69705 - DNA, 22 bp, synthetic construct
  misc_feature 1..22: note = chemically synthesized
  source 1..22: mol_type = other DNA
tggctattttaaattgtcccta

SEQ ID NO: 69706 - DNA, 22 bp, synthetic construct
  misc_feature 1..22: note = chemically synthesized
  source 1..22: mol_type = other DNA
ttttaaattgtccctaattcgt

SEQ ID NO: 69707 - DNA, 22 bp, synthetic construct
  misc_feature 1..22: note = chemically synthesized
  source 1..22: mol_type = other DNA
taaattgtccctaattcgttgc

SEQ ID NO: 69708 - DNA, 22 bp, synthetic construct
  misc_feature 1..22: note = chemically synthesized
  source 1..22: mol_type = other DNA
aaattgtccctaattcgttgct

SEQ ID NO: 69709 - DNA, 22 bp, synthetic construct
  misc_feature 1..22: note = chemically synthesized
  source 1..22: mol_type = other DNA
aattgtccctaattcgttgctg

SEQ ID NO: 69710 - DNA, 22 bp, synthetic construct
  misc_feature 1..22: note = chemically synthesized
  source 1..22: mol_type = other DNA
tccctaattcgttgctgagcaa

SEQ ID NO: 69711 - DNA, 22 bp, synthetic construct
  misc_feature 1..22: note = chemically synthesized
  source 1..22: mol_type = other DNA
attcgttgctgagcaaacatgt

SEQ ID NO: 69712 - DNA, 22 bp, synthetic construct
  misc_feature 1..22: note = chemically synthesized
  source 1..22: mol_type = other DNA
gttgctgagcaaacatgttgct

SEQ ID NO: 69713 - DNA, 22 bp, synthetic construct
  misc_feature 1..22: note = chemically synthesized
  source 1..22: mol_type = other DNA
ctgagcaaacatgttgctgttt

SEQ ID NO: 69714 - DNA, 22 bp, synthetic construct
  misc_feature 1..22: note = chemically synthesized
  source 1..22: mol_type = other DNA
agcaaacatgttgctgtttcca

SEQ ID NO: 69715 - DNA, 22 bp, synthetic construct
  misc_feature 1..22: note = chemically synthesized
  source 1..22: mol_type = other DNA
ctgtttccagttccgttctgag

SEQ ID NO: 69716 - DNA, 22 bp, synthetic construct
  misc_feature 1..22: note = chemically synthesized
  source 1..22: mol_type = other DNA
tttccagttccgttctgagaga

SEQ ID NO: 69717 - DNA, 22 bp, synthetic construct
  misc_feature 1..22: note = chemically synthesized
  source 1..22: mol_type = other DNA
ccagttccgttctgagagaaaa

SEQ ID NO: 69718 - DNA, 22 bp, synthetic construct
  misc_feature 1..22: note = chemically synthesized
  source 1..22: mol_type = other DNA
cagttccgttctgagagaaaaa

SEQ ID NO: 69719 - DNA, 22 bp, synthetic construct
  misc_feature 1..22: note = chemically synthesized
  source 1..22: mol_type = other DNA
cgttctgagagaaaaagagaga

SEQ ID NO: 69720 - DNA, 22 bp, synthetic construct
  misc_feature 1..22: note = chemically synthesized
  source 1..22: mol_type = other DNA
tgagagaaaaagagagagagag

SEQ ID NO: 69721 - DNA, 22 bp, synthetic construct
  misc_feature 1..22: note = chemically synthesized
  source 1..22: mol_type = other DNA
agagaaaaagagagagagagag

SEQ ID NO: 69722 - DNA, 22 bp, synthetic construct
  misc_feature 1..22: note = chemically synthesized
  source 1..22: mol_type = other DNA
catacattctgtaatacatatc

SEQ ID NO: 69723 - DNA, 22 bp, synthetic construct
  misc_feature 1..22: note = chemically synthesized
  source 1..22: mol_type = other DNA
tgtaatacatatcatgtacagt

SEQ ID NO: 69724 - DNA, 22 bp, synthetic construct
  misc_feature 1..22: note = chemically synthesized
  source 1..22: mol_type = other DNA
taatacatatcatgtacagttt

SEQ ID NO: 69725 - DNA, 22 bp, synthetic construct
  misc_feature 1..22: note = chemically synthesized
  source 1..22: mol_type = other DNA
tattttataacgtgaggaggaa

SEQ ID NO: 69726 - DNA, 22 bp, synthetic construct
  misc_feature 1..22: note = chemically synthesized
  source 1..22: mol_type = other DNA
attttataacgtgaggaggaaa

SEQ ID NO: 69727 - DNA, 22 bp, synthetic construct
  misc_feature 1..22: note = chemically synthesized
  source 1..22: mol_type = other DNA
ttttataacgtgaggaggaaaa

SEQ ID NO: 69728 - DNA, 22 bp, synthetic construct
  misc_feature 1..22: note = chemically synthesized
  source 1..22: mol_type = other DNA
tataacgtgaggaggaaaaaca

SEQ ID NO: 69729 - DNA, 22 bp, synthetic construct
  misc_feature 1..22: note = chemically synthesized
  source 1..22: mol_type = other DNA
ataacgtgaggaggaaaaacag

SEQ ID NO: 69730 - DNA, 22 bp, synthetic construct
  misc_feature 1..22: note = chemically synthesized
  source 1..22: mol_type = other DNA
taacgtgaggaggaaaaacagt

SEQ ID NO: 69731 - DNA, 22 bp, synthetic construct
  misc_feature 1..22: note = chemically synthesized
  source 1..22: mol_type = other DNA
tggattaaccctctatagacag

SEQ ID NO: 69732 - DNA, 22 bp, synthetic construct
  misc_feature 1..22: note = chemically synthesized
  source 1..22: mol_type = other DNA
ggattaaccctctatagacaga

SEQ ID NO: 69733 - DNA, 22 bp, synthetic construct
  misc_feature 1..22: note = chemically synthesized
  source 1..22: mol_type = other DNA
gattaaccctctatagacagaa

SEQ ID NO: 69734 - DNA, 22 bp, synthetic construct
  misc_feature 1..22: note = chemically synthesized
  source 1..22: mol_type = other DNA
accctctatagacagaatagat

SEQ ID NO: 69735 - DNA, 22 bp, synthetic construct
  misc_feature 1..22: note = chemically synthesized
  source 1..22: mol_type = other DNA
tatagacagaatagatagcact

SEQ ID NO: 69736 - DNA, 22 bp, synthetic construct
  misc_feature 1..22: note = chemically synthesized
  source 1..22: mol_type = other DNA
tagacagaatagatagcactga

SEQ ID NO: 69737 - DNA, 22 bp, synthetic construct
  misc_feature 1..22: note = chemically synthesized
  source 1..22: mol_type = other DNA
aaaaaaaatctctatgagctaa

SEQ ID NO: 69738 - DNA, 22 bp, synthetic construct
  misc_feature 1..22: note = chemically synthesized
  source 1..22: mol_type = other DNA
tatgagctaaatgtctgtctct

SEQ ID NO: 69739 - DNA, 22 bp, synthetic construct
  misc_feature 1..22: note = chemically synthesized
  source 1..22: mol_type = other DNA
tgagctaaatgtctgtctctaa

SEQ ID NO: 69740 - DNA, 22 bp, synthetic construct
  misc_feature 1..22: note = chemically synthesized
  source 1..22: mol_type = other DNA
aatgtctgtctctaaagggtta

SEQ ID NO: 69741 - DNA, 22 bp, synthetic construct
  misc_feature 1..22: note = chemically synthesized
  source 1..22: mol_type = other DNA
tctctaaagggttaaatgtatc

SEQ ID NO: 69742 - DNA, 22 bp, synthetic construct
  misc_feature 1..22: note = chemically synthesized
  source 1..22: mol_type = other DNA
taaagggttaaatgtatcaatt

SEQ ID NO: 69743 - DNA, 22 bp, synthetic construct
  misc_feature 1..22: note = chemically synthesized
  source 1..22: mol_type = other DNA
aagggttaaatgtatcaattgg

SEQ ID NO: 69744 - DNA, 22 bp, synthetic construct
  misc_feature 1..22: note = chemically synthesized
  source 1..22: mol_type = other DNA
aatgtatcaattggaaaggaag

SEQ ID NO: 69745 - DNA, 22 bp, synthetic construct
  misc_feature 1..22: note = chemically synthesized
  source 1..22: mol_type = other DNA
gaaaggaagaaaaaaggccttg

SEQ ID NO: 69746 - DNA, 22 bp, synthetic construct
  misc_feature 1..22: note = chemically synthesized
  source 1..22: mol_type = other DNA
gaattgacaaattaacagaaaa

SEQ ID NO: 69747 - DNA, 22 bp, synthetic construct
  misc_feature 1..22: note = chemically synthesized
  source 1..22: mol_type = other DNA
aattgacaaattaacagaaaaa

SEQ ID NO: 69748 - DNA, 22 bp, synthetic construct
  misc_feature 1..22: note = chemically synthesized
  source 1..22: mol_type = other DNA
acaaattaacagaaaaacagaa

SEQ ID NO: 69749 - DNA, 22 bp, synthetic construct
  misc_feature 1..22: note = chemically synthesized
  source 1..22: mol_type = other DNA
acagaaaaacagaacaagttta

SEQ ID NO: 69750 - DNA, 22 bp, synthetic construct
  misc_feature 1..22: note = chemically synthesized
  source 1..22: mol_type = other DNA
attctatcatttggttttaaaa

SEQ ID NO: 69751 - DNA, 22 bp, synthetic construct
  misc_feature 1..22: note = chemically synthesized
  source 1..22: mol_type = other DNA
ttctatcatttggttttaaaat

SEQ ID NO: 69752 - DNA, 22 bp, synthetic construct
  misc_feature 1..22: note = chemically synthesized
  source 1..22: mol_type = other DNA
tatcatttggttttaaaatatg

SEQ ID NO: 69753 - DNA, 22 bp, synthetic construct
  misc_feature 1..22: note = chemically synthesized
  source 1..22: mol_type = other DNA
tcatttggttttaaaatatgag

SEQ ID NO: 69754 - DNA, 22 bp, synthetic construct
  misc_feature 1..22: note = chemically synthesized
  source 1..22: mol_type = other DNA
ggttttaaaatatgagtgcctt

SEQ ID NO: 69755 - DNA, 22 bp, synthetic construct
  misc_feature 1..22: note = chemically synthesized
  source 1..22: mol_type = other DNA
gttttaaaatatgagtgccttg

SEQ ID NO: 69756 - DNA, 22 bp, synthetic construct
  misc_feature 1..22: note = chemically synthesized
  source 1..22: mol_type = other DNA
taaaatatgagtgccttggatc

SEQ ID NO: 69757 - DNA, 22 bp, synthetic construct
  misc_feature 1..22: note = chemically synthesized
  source 1..22: mol_type = other DNA
aaaatatgagtgccttggatct

SEQ ID NO: 69758 - DNA, 22 bp, synthetic construct
  misc_feature 1..22: note = chemically synthesized
  source 1..22: mol_type = other DNA
aaatatgagtgccttggatcta

SEQ ID NO: 69759 - DNA, 22 bp, synthetic construct
  misc_feature 1..22: note = chemically synthesized
  source 1..22: mol_type = other DNA
ggatctattaaaaccacatcga

SEQ ID NO: 69760 - DNA, 22 bp, synthetic construct
  misc_feature 1..22: note = chemically synthesized
  source 1..22: mol_type = other DNA
gatctattaaaaccacatcgat

SEQ ID NO: 69761 - DNA, 22 bp, synthetic construct
  misc_feature 1..22: note = chemically synthesized
  source 1..22: mol_type = other DNA
ttaaaaccacatcgatggttct

SEQ ID NO: 69762 - DNA, 22 bp, synthetic construct
  misc_feature 1..22: note = chemically synthesized
  source 1..22: mol_type = other DNA
aaaccacatcgatggttctttc

SEQ ID NO: 69763 - DNA, 22 bp, synthetic construct
  misc_feature 1..22: note = chemically synthesized
  source 1..22: mol_type = other DNA
tttctacttgttataaacttgt

SEQ ID NO: 69764 - DNA, 22 bp, synthetic construct
  misc_feature 1..22: note = chemically synthesized
  source 1..22: mol_type = other DNA
tctacttgttataaacttgtag

SEQ ID NO: 69765 - DNA, 22 bp, synthetic construct
  misc_feature 1..22: note = chemically synthesized
  source 1..22: mol_type = other DNA
ctacttgttataaacttgtagc

SEQ ID NO: 69766 - DNA, 22 bp, synthetic construct
  misc_feature 1..22: note = chemically synthesized
  source 1..22: mol_type = other DNA
tacttgttataaacttgtagct

SEQ ID NO: 69767 - DNA, 22 bp, synthetic construct
  misc_feature 1..22: note = chemically synthesized
  source 1..22: mol_type = other DNA
cttgttataaacttgtagctta

SEQ ID NO: 69768 - DNA, 22 bp, synthetic construct
  misc_feature 1..22: note = chemically synthesized
  source 1..22: mol_type = other DNA
gttataaacttgtagcttaatt

SEQ ID NO: 69769 - DNA, 22 bp, synthetic construct
  misc_feature 1..22: note = chemically synthesized
  source 1..22: mol_type = other DNA
ttataaacttgtagcttaattc

SEQ ID NO: 69770 - DNA, 22 bp, synthetic construct
  misc_feature 1..22: note = chemically synthesized
  source 1..22: mol_type = other DNA
taaacttgtagcttaattcagc

SEQ ID NO: 69771 - DNA, 22 bp, synthetic construct
  misc_feature 1..22: note = chemically synthesized
  source 1..22: mol_type = other DNA
gtagcttaattcagcattgggt

SEQ ID NO: 69772 - DNA, 22 bp, synthetic construct
  misc_feature 1..22: note = chemically synthesized
  source 1..22: mol_type = other DNA
tagcttaattcagcattgggtg

SEQ ID NO: 69773 - DNA, 22 bp, synthetic construct
  misc_feature 1..22: note = chemically synthesized
  source 1..22: mol_type = other DNA
aattcagcattgggtgaggtaa

SEQ ID NO: 69774 - DNA, 22 bp, synthetic construct
  misc_feature 1..22: note = chemically synthesized
  source 1..22: mol_type = other DNA
attcagcattgggtgaggtaat

SEQ ID NO: 69775 - DNA, 22 bp, synthetic construct
  misc_feature 1..22: note = chemically synthesized
  source 1..22: mol_type = other DNA
agcattgggtgaggtaataaac

SEQ ID NO: 69776 - DNA, 22 bp, synthetic construct
  misc_feature 1..22: note = chemically synthesized
  source 1..22: mol_type = other DNA
ggtgaggtaataaaccttagga

SEQ ID NO: 69777 - DNA, 22 bp, synthetic construct
  misc_feature 1..22: note = chemically synthesized
  source 1..22: mol_type = other DNA
aggaactagcatataattctat

SEQ ID NO: 69778 - DNA, 22 bp, synthetic construct
  misc_feature 1..22: note = chemically synthesized
  source 1..22: mol_type = other DNA
ggaactagcatataattctata

SEQ ID NO: 69779 - DNA, 22 bp, synthetic construct
  misc_feature 1..22: note = chemically synthesized
  source 1..22: mol_type = other DNA
gcatataattctatattgtatt

SEQ ID NO: 69780 - DNA, 22 bp, synthetic construct
  misc_feature 1..22: note = chemically synthesized
  source 1..22: mol_type = other DNA
tatattgtatttctcacaacaa

SEQ ID NO: 69781 - DNA, 22 bp, synthetic construct
  misc_feature 1..22: note = chemically synthesized
  source 1..22: mol_type = other DNA
tattgtatttctcacaacaatg

SEQ ID NO: 69782 - DNA, 22 bp, synthetic construct
  misc_feature 1..22: note = chemically synthesized
  source 1..22: mol_type = other DNA
tatttctcacaacaatggctac

SEQ ID NO: 69783 - DNA, 22 bp, synthetic construct
  misc_feature 1..22: note = chemically synthesized
  source 1..22: mol_type = other DNA
ctcacaacaatggctacctaaa

SEQ ID NO: 69784 - DNA, 22 bp, synthetic construct
  misc_feature 1..22: note = chemically synthesized
  source 1..22: mol_type = other DNA
tcacaacaatggctacctaaaa

SEQ ID NO: 69785 - DNA, 22 bp, synthetic construct
  misc_feature 1..22: note = chemically synthesized
  source 1..22: mol_type = other DNA
acaacaatggctacctaaaaag

SEQ ID NO: 69786 - DNA, 22 bp, synthetic construct
  misc_feature 1..22: note = chemically synthesized
  source 1..22: mol_type = other DNA
cctaaaaagatgacccattatg

SEQ ID NO: 69787 - DNA, 22 bp, synthetic construct
  misc_feature 1..22: note = chemically synthesized
  source 1..22: mol_type = other DNA
aaaagatgacccattatgtcct

SEQ ID NO: 69788 - DNA, 22 bp, synthetic construct
  misc_feature 1..22: note = chemically synthesized
  source 1..22: mol_type = other DNA
tgtcctagttaatcatcatttt

SEQ ID NO: 69789 - DNA, 22 bp, synthetic construct
  misc_feature 1..22: note = chemically synthesized
  source 1..22: mol_type = other DNA
gttaatcatcatttttccttta

SEQ ID NO: 69790 - DNA, 22 bp, synthetic construct
  misc_feature 1..22: note = chemically synthesized
  source 1..22: mol_type = other DNA
atcatcatttttcctttagttt

SEQ ID NO: 69791 - DNA, 22 bp, synthetic construct
  misc_feature 1..22: note = chemically synthesized
  source 1..22: mol_type = other DNA
ttcctttagtttaattttataa

SEQ ID NO: 69792 - DNA, 22 bp, synthetic construct
  misc_feature 1..22: note = chemically synthesized
  source 1..22: mol_type = other DNA
tcctttagtttaattttataaa

SEQ ID NO: 69793 - DNA, 22 bp, synthetic construct
  misc_feature 1..22: note = chemically synthesized
  source 1..22: mol_type = other DNA
cctttagtttaattttataaac

SEQ ID NO: 69794 - DNA, 22 bp, synthetic construct
  misc_feature 1..22: note = chemically synthesized
  source 1..22: mol_type = other DNA
ctttagtttaattttataaaca

SEQ ID NO: 69795 - DNA, 22 bp, synthetic construct
  misc_feature 1..22: note = chemically synthesized
  source 1..22: mol_type = other DNA
tagtttaattttataaacaaaa

SEQ ID NO: 69796 - DNA, 22 bp, synthetic construct
  misc_feature 1..22: note = chemically synthesized
  source 1..22: mol_type = other DNA
agtttaattttataaacaaaac

SEQ ID NO: 69797 - DNA, 22 bp, synthetic construct
  misc_feature 1..22: note = chemically synthesized
  source 1..22: mol_type = other DNA
gtttaattttataaacaaaact

SEQ ID NO: 69798 - DNA, 22 bp, synthetic construct
  misc_feature 1..22: note = chemically synthesized
  source 1..22: mol_type = other DNA
aattttataaacaaaactgatt

SEQ ID NO: 69799 - DNA, 22 bp, synthetic construct
  misc_feature 1..22: note = chemically synthesized
  source 1..22: mol_type = other DNA
attttataaacaaaactgatta

SEQ ID NO: 69800 - DNA, 22 bp, synthetic construct
  misc_feature 1..22: note = chemically synthesized
  source 1..22: mol_type = other DNA
tataaacaaaactgattatacc

SEQ ID NO: 69801 - DNA, 22 bp, synthetic construct
  misc_feature 1..22: note = chemically synthesized
  source 1..22: mol_type = other DNA
ataaacaaaactgattatacca

SEQ ID NO: 69802 - DNA, 22 bp, synthetic construct
  misc_feature 1..22: note = chemically synthesized
  source 1..22: mol_type = other DNA
taaacaaaactgattataccag

SEQ ID NO: 69803 - DNA, 22 bp, synthetic construct
  misc_feature 1..22: note = chemically synthesized
  source 1..22: mol_type = other DNA
attataccagtataaaagctac

SEQ ID NO: 69804 - DNA, 22 bp, synthetic construct
  misc_feature 1..22: note = chemically synthesized
  source 1..22: mol_type = other DNA
taccagtataaaagctactttg

SEQ ID NO: 69805 - DNA, 22 bp, synthetic construct
  misc_feature 1..22: note = chemically synthesized
  source 1..22: mol_type = other DNA
ctttgctcctggtgagagctta

SEQ ID NO: 69806 - DNA, 22 bp, synthetic construct
  misc_feature 1..22: note = chemically synthesized
  source 1..22: mol_type = other DNA
tgctcctggtgagagcttaaaa

SEQ ID NO: 69807 - DNA, 22 bp, synthetic construct
  misc_feature 1..22: note = chemically synthesized
  source 1..22: mol_type = other DNA
gctcctggtgagagcttaaaag

SEQ ID NO: 69808 - DNA, 22 bp, synthetic construct
  misc_feature 1..22: note = chemically synthesized
  source 1..22: mol_type = other DNA
ctcctggtgagagcttaaaaga

SEQ ID NO: 69809 - DNA, 22 bp, synthetic construct
  misc_feature 1..22: note = chemically synthesized
  source 1..22: mol_type = other DNA
ctggtgagagcttaaaagaaat

SEQ ID NO: 69810 - DNA, 22 bp, synthetic construct
  misc_feature 1..22: note = chemically synthesized
  source 1..22: mol_type = other DNA
gtgagagcttaaaagaaatggg

SEQ ID NO: 69811 - DNA, 22 bp, synthetic construct
  misc_feature 1..22: note = chemically synthesized
  source 1..22: mol_type = other DNA
aaaagaaatgggctgttttgcc

SEQ ID NO: 69812 - DNA, 22 bp, synthetic construct
  misc_feature 1..22: note = chemically synthesized
  source 1..22: mol_type = other DNA
aaagaaatgggctgttttgccc

SEQ ID NO: 69813 - DNA, 22 bp, synthetic construct
  misc_feature 1..22: note = chemically synthesized
  source 1..22: mol_type = other DNA
ttttgcccaaagttttattttt

SEQ ID NO: 69814 - DNA, 22 bp, synthetic construct
  misc_feature 1..22: note = chemically synthesized
  source 1..22: mol_type = other DNA
tgcccaaagttttatttttttt

SEQ ID NO: 69815 - DNA, 22 bp, synthetic construct
  misc_feature 1..22: note = chemically synthesized
  source 1..22: mol_type = other DNA
gcccaaagttttatttttttta

SEQ ID NO: 69816 - DNA, 22 bp, synthetic construct
  misc_feature 1..22: note = chemically synthesized
  source 1..22: mol_type = other DNA
cccaaagttttattttttttaa

SEQ ID NO: 69817 - DNA, 22 bp, synthetic construct
  misc_feature 1..22: note = chemically synthesized
  source 1..22: mol_type = other DNA
tattttttttaaacaatgatta

SEQ ID NO: 69818 - DNA, 22 bp, synthetic construct
  misc_feature 1..22: note = chemically synthesized
  source 1..22: mol_type = other DNA
attttttttaaacaatgattaa

SEQ ID NO: 69819 - DNA, 22 bp, synthetic construct
  misc_feature 1..22: note = chemically synthesized
  source 1..22: mol_type = other DNA
ttttttttaaacaatgattaaa

SEQ ID NO: 69820 - DNA, 22 bp, synthetic construct
  misc_feature 1..22: note = chemically synthesized
  source 1..22: mol_type = other DNA
tttttaaacaatgattaaattg

SEQ ID NO: 69821 - DNA, 22 bp, synthetic construct
  misc_feature 1..22: note = chemically synthesized
  source 1..22: mol_type = other DNA
ttttaaacaatgattaaattga

SEQ ID NO: 69822 - DNA, 22 bp, synthetic construct
  misc_feature 1..22: note = chemically synthesized
  source 1..22: mol_type = other DNA
tttaaacaatgattaaattgaa

SEQ ID NO: 69823 - DNA, 22 bp, synthetic construct
  misc_feature 1..22: note = chemically synthesized
  source 1..22: mol_type = other DNA
ttaaacaatgattaaattgaat

SEQ ID NO: 69824 - DNA, 22 bp, synthetic construct
  misc_feature 1..22: note = chemically synthesized
  source 1..22: mol_type = other DNA
taaacaatgattaaattgaatg

SEQ ID NO: 69825 - DNA, 22 bp, synthetic construct
  misc_feature 1..22: note = chemically synthesized
  source 1..22: mol_type = other DNA
aaacaatgattaaattgaatgt

SEQ ID NO: 69826 - DNA, 22 bp, synthetic construct
  misc_feature 1..22: note = chemically synthesized
  source 1..22: mol_type = other DNA
aacaatgattaaattgaatgtg

SEQ ID NO: 69827 - DNA, 22 bp, synthetic construct
  misc_feature 1..22: note = chemically synthesized
  source 1..22: mol_type = other DNA
aattgaatgtgtaatgtgcaaa

SEQ ID NO: 69828 - DNA, 22 bp, synthetic construct
  misc_feature 1..22: note = chemically synthesized
  source 1..22: mol_type = other DNA
aatgtgtaatgtgcaaaagccc

SEQ ID NO: 69829 - DNA, 22 bp, synthetic construct
  misc_feature 1..22: note = chemically synthesized
  source 1..22: mol_type = other DNA
gaacgcaattaaatacactagt

SEQ ID NO: 69830 - DNA, 22 bp, synthetic construct
  misc_feature 1..22: note = chemically synthesized
  source 1..22: mol_type = other DNA
aatacactagtaaggagttcat

SEQ ID NO: 69831 - DNA, 22 bp, synthetic construct
  misc_feature 1..22: note = chemically synthesized
  source 1..22: mol_type = other DNA
gtaaggagttcattttatgaag

SEQ ID NO: 69832 - DNA, 22 bp, synthetic construct
  misc_feature 1..22: note = chemically synthesized
  source 1..22: mol_type = other DNA
attttatgaagatatttgcttt

SEQ ID NO: 69833 - DNA, 22 bp, synthetic construct
  misc_feature 1..22: note = chemically synthesized
  source 1..22: mol_type = other DNA
tatgaagatatttgctttaata

SEQ ID NO: 69834 - DNA, 22 bp, synthetic construct
  misc_feature 1..22: note = chemically synthesized
  source 1..22: mol_type = other DNA
atgaagatatttgctttaataa

SEQ ID NO: 69835 - DNA, 22 bp, synthetic construct
  misc_feature 1..22: note = chemically synthesized
  source 1..22: mol_type = other DNA
tgaagatatttgctttaataat

SEQ ID NO: 69836 - DNA, 22 bp, synthetic construct
  misc_feature 1..22: note = chemically synthesized
  source 1..22: mol_type = other DNA
gctttaataatgtctttttaaa

SEQ ID NO: 69837 - DNA, 22 bp, synthetic construct
  misc_feature 1..22: note = chemically synthesized
  source 1..22: mol_type = other DNA
ctttaataatgtctttttaaaa

SEQ ID NO: 69838 - DNA, 22 bp, synthetic construct
  misc_feature 1..22: note = chemically synthesized
  source 1..22: mol_type = other DNA
taataatgtctttttaaaaata

SEQ ID NO: 69839 - DNA, 22 bp, synthetic construct
  misc_feature 1..22: note = chemically synthesized
  source 1..22: mol_type = other DNA
aataatgtctttttaaaaatac

SEQ ID NO: 69840 - DNA, 22 bp, synthetic construct
  misc_feature 1..22: note = chemically synthesized
  source 1..22: mol_type = other DNA
ataatgtctttttaaaaatact

SEQ ID NO: 69841 - DNA, 22 bp, synthetic construct
  misc_feature 1..22: note = chemically synthesized
  source 1..22: mol_type = other DNA
tttaaaaatactggcaccaaaa

SEQ ID NO: 69842 - DNA, 22 bp, synthetic construct
  misc_feature 1..22: note = chemically synthesized
  source 1..22: mol_type = other DNA
ttaaaaatactggcaccaaaag

SEQ ID NO: 69843 - DNA, 22 bp, synthetic construct
  misc_feature 1..22: note = chemically synthesized
  source 1..22: mol_type = other DNA
taaaaatactggcaccaaaaga

SEQ ID NO: 69844 - DNA, 22 bp, synthetic construct
  misc_feature 1..22: note = chemically synthesized
  source 1..22: mol_type = other DNA
aaaaatactggcaccaaaagaa

SEQ ID NO: 69845 - DNA, 22 bp, synthetic construct
  misc_feature 1..22: note = chemically synthesized
  source 1..22: mol_type = other DNA
aaaatactggcaccaaaagaaa

SEQ ID NO: 69846 - DNA, 22 bp, synthetic construct
  misc_feature 1..22: note = chemically synthesized
  source 1..22: mol_type = other DNA
gcaccaaaagaaatagatccag

SEQ ID NO: 69847 - DNA, 22 bp, synthetic construct
  misc_feature 1..22: note = chemically synthesized
  source 1..22: mol_type = other DNA
cttggttgtcaagtggacaatc

SEQ ID NO: 69848 - DNA, 22 bp, synthetic construct
  misc_feature 1..22: note = chemically synthesized
  source 1..22: mol_type = other DNA
ggttgtcaagtggacaatcaaa

SEQ ID NO: 69849 - DNA, 22 bp, synthetic construct
  misc_feature 1..22: note = chemically synthesized
  source 1..22: mol_type = other DNA
gttgtcaagtggacaatcaaat

SEQ ID NO: 69850 - DNA, 22 bp, synthetic construct
  misc_feature 1..22: note = chemically synthesized
  source 1..22: mol_type = other DNA
tcaagtggacaatcaaatgata

SEQ ID NO: 69851 - DNA, 22 bp, synthetic construct
  misc_feature 1..22: note = chemically synthesized
  source 1..22: mol_type = other DNA
taagaccttgtataccatattg

SEQ ID NO: 69852 - DNA, 22 bp, synthetic construct
  misc_feature 1..22: note = chemically synthesized
  source 1..22: mol_type = other DNA
aagaccttgtataccatattga

SEQ ID NO: 69853 - DNA, 22 bp, synthetic construct
  misc_feature 1..22: note = chemically synthesized
  source 1..22: mol_type = other DNA
agaccttgtataccatattgaa

SEQ ID NO: 69854 - DNA, 22 bp, synthetic construct
  misc_feature 1..22: note = chemically synthesized
  source 1..22: mol_type = other DNA
gtataccatattgaaaggaaga

SEQ ID NO: 69855 - DNA, 22 bp, synthetic construct
  misc_feature 1..22: note = chemically synthesized
  source 1..22: mol_type = other DNA
tataccatattgaaaggaagag

SEQ ID NO: 69856 - DNA, 22 bp, synthetic construct
  misc_feature 1..22: note = chemically synthesized
  source 1..22: mol_type = other DNA
aaaggaagaggctgacaataag

SEQ ID NO: 69857 - DNA, 22 bp, synthetic construct
  misc_feature 1..22: note = chemically synthesized
  source 1..22: mol_type = other DNA
acaataaggtttgacagagggg

SEQ ID NO: 69858 - DNA, 22 bp, synthetic construct
  misc_feature 1..22: note = chemically synthesized
  source 1..22: mol_type = other DNA
gacagaggggaacagaagaaaa

SEQ ID NO: 69859 - DNA, 22 bp, synthetic construct
  misc_feature 1..22: note = chemically synthesized
  source 1..22: mol_type = other DNA
acagaggggaacagaagaaaat

SEQ ID NO: 69860 - DNA, 22 bp, synthetic construct
  misc_feature 1..22: note = chemically synthesized
  source 1..22: mol_type = other DNA
attagcacaacgtggtactatt

SEQ ID NO: 69861 - DNA, 22 bp, synthetic construct
  misc_feature 1..22: note = chemically synthesized
  source 1..22: mol_type = other DNA
ttagcacaacgtggtactattt

SEQ ID NO: 69862 - DNA, 22 bp, synthetic construct
  misc_feature 1..22: note = chemically synthesized
  source 1..22: mol_type = other DNA
gcacaacgtggtactatttgcc

SEQ ID NO: 69863 - DNA, 22 bp, synthetic construct
  misc_feature 1..22: note = chemically synthesized
  source 1..22: mol_type = other DNA
tttgccatttaaaactagaaca

SEQ ID NO: 69864 - DNA, 22 bp, synthetic construct
  misc_feature 1..22: note = chemically synthesized
  source 1..22: mol_type = other DNA
gccatttaaaactagaacaggt

SEQ ID NO: 69865 - DNA, 22 bp, synthetic construct
  misc_feature 1..22: note = chemically synthesized
  source 1..22: mol_type = other DNA
ccatttaaaactagaacaggta

SEQ ID NO: 69866 - DNA, 22 bp, synthetic construct
  misc_feature 1..22: note = chemically synthesized
  source 1..22: mol_type = other DNA
aaaactagaacaggtatataag

SEQ ID NO: 69867 - DNA, 22 bp, synthetic construct
  misc_feature 1..22: note = chemically synthesized
  source 1..22: mol_type = other DNA
aaactagaacaggtatataagc

SEQ ID NO: 69868 - DNA, 22 bp, synthetic construct
  misc_feature 1..22: note = chemically synthesized
  source 1..22: mol_type = other DNA
gaacaggtatataagctaatat

SEQ ID NO: 69869 - DNA, 22 bp, synthetic construct
  misc_feature 1..22: note = chemically synthesized
  source 1..22: mol_type = other DNA
atattgatacaatgatgattaa

SEQ ID NO: 69870 - DNA, 22 bp, synthetic construct
  misc_feature 1..22: note = chemically synthesized
  source 1..22: mol_type = other DNA
atacaatgatgattaactatga

SEQ ID NO: 69871 - DNA, 22 bp, synthetic construct
  misc_feature 1..22: note = chemically synthesized
  source 1..22: mol_type = other DNA
actatgaattcttaagacttgc

SEQ ID NO: 69872 - DNA, 22 bp, synthetic construct
  misc_feature 1..22: note = chemically synthesized
  source 1..22: mol_type = other DNA
tgaattcttaagacttgcattt

SEQ ID NO: 69873 - DNA, 22 bp, synthetic construct
  misc_feature 1..22: note = chemically synthesized
  source 1..22: mol_type = other DNA
ttaagacttgcatttaaatgtg

SEQ ID NO: 69874 - DNA, 22 bp, synthetic construct
  misc_feature 1..22: note = chemically synthesized
  source 1..22: mol_type = other DNA
aagacttgcatttaaatgtgac

SEQ ID NO: 69875 - DNA, 22 bp, synthetic construct
  misc_feature 1..22: note = chemically synthesized
  source 1..22: mol_type = other DNA
agacttgcatttaaatgtgaca

SEQ ID NO: 69876 - DNA, 22 bp, synthetic construct
  misc_feature 1..22: note = chemically synthesized
  source 1..22: mol_type = other DNA
gcatttaaatgtgacattctta

SEQ ID NO: 69877 - DNA, 22 bp, synthetic construct
  misc_feature 1..22: note = chemically synthesized
  source 1..22: mol_type = other DNA
catttaaatgtgacattcttaa

SEQ ID NO: 69878 - DNA, 22 bp, synthetic construct
  misc_feature 1..22: note = chemically synthesized
  source 1..22: mol_type = other DNA
aaatgtgacattcttaaaaaaa

SEQ ID NO: 69879 - DNA, 22 bp, synthetic construct
  misc_feature 1..22: note = chemically synthesized
  source 1..22: mol_type = other DNA
aatgtgacattcttaaaaaaag

SEQ ID NO: 69880 - DNA, 22 bp, synthetic construct
  misc_feature 1..22: note = chemically synthesized
  source 1..22: mol_type = other DNA
ttaaaaaaagaagagaaagaat

SEQ ID NO: 69881 - DNA, 22 bp, synthetic construct
  misc_feature 1..22: note = chemically synthesized
  source 1..22: mol_type = other DNA
aaaaaaagaagagaaagaattt

SEQ ID NO: 69882 - DNA, 22 bp, synthetic construct
  misc_feature 1..22: note = chemically synthesized
  source 1..22: mol_type = other DNA
aaaaaagaagagaaagaatttt

SEQ ID NO: 69883 - DNA, 22 bp, synthetic construct
  misc_feature 1..22: note = chemically synthesized
  source 1..22: mol_type = other DNA
taagagtagcagtatatatgtc

SEQ ID NO: 69884 - DNA, 22 bp, synthetic construct
  misc_feature 1..22: note = chemically synthesized
  source 1..22: mol_type = other DNA
aagagtagcagtatatatgtct

SEQ ID NO: 69885 - DNA, 22 bp, synthetic construct
  misc_feature 1..22: note = chemically synthesized
  source 1..22: mol_type = other DNA
agagtagcagtatatatgtctg

SEQ ID NO: 69886 - DNA, 22 bp, synthetic construct
  misc_feature 1..22: note = chemically synthesized
  source 1..22: mol_type = other DNA
tgctccctaaaagttgtacttc

SEQ ID NO: 69887 - DNA, 22 bp, synthetic construct
  misc_feature 1..22: note = chemically synthesized
  source 1..22: mol_type = other DNA
cctaaaagttgtacttcatttc

SEQ ID NO: 69888 - DNA, 22 bp, synthetic construct
  misc_feature 1..22: note = chemically synthesized
  source 1..22: mol_type = other DNA
aaagttgtacttcatttctttt

SEQ ID NO: 69889 - DNA, 22 bp, synthetic construct
  misc_feature 1..22: note = chemically synthesized
  source 1..22: mol_type = other DNA
tacttcatttcttttccataca

SEQ ID NO: 69890 - DNA, 22 bp, synthetic construct
  misc_feature 1..22: note = chemically synthesized
  source 1..22: mol_type = other DNA
catttcttttccatacactgtg

SEQ ID NO: 69891 - DNA, 22 bp, synthetic construct
  misc_feature 1..22: note = chemically synthesized
  source 1..22: mol_type = other DNA
atttcttttccatacactgtgt

SEQ ID NO: 69892 - DNA, 22 bp, synthetic construct
  misc_feature 1..22: note = chemically synthesized
  source 1..22: mol_type = other DNA
cttttccatacactgtgtgcta

SEQ ID NO: 69893 - DNA, 22 bp, synthetic construct
  misc_feature 1..22: note = chemically synthesized
  source 1..22: mol_type = other DNA
ttttccatacactgtgtgctat

SEQ ID NO: 69894 - DNA, 22 bp, synthetic construct
  misc_feature 1..22: note = chemically synthesized
  source 1..22: mol_type = other DNA
ttccatacactgtgtgctattt

SEQ ID NO: 69895 - DNA, 22 bp, synthetic construct
  misc_feature 1..22: note = chemically synthesized
  source 1..22: mol_type = other DNA
tccatacactgtgtgctatttg

SEQ ID NO: 69896 - DNA, 22 bp, synthetic construct
  misc_feature 1..22: note = chemically synthesized
  source 1..22: mol_type = other DNA
ccatacactgtgtgctatttgt

SEQ ID NO: 69897 - DNA, 22 bp, synthetic construct
  misc_feature 1..22: note = chemically synthesized
  source 1..22: mol_type = other DNA
catacactgtgtgctatttgtg

SEQ ID NO: 69898 - DNA, 22 bp, synthetic construct
  misc_feature 1..22: note = chemically synthesized
  source 1..22: mol_type = other DNA
tgtgctatttgtgttaacatgg

SEQ ID NO: 69899 - DNA, 22 bp, synthetic construct
  misc_feature 1..22: note = chemically synthesized
  source 1..22: mol_type = other DNA
tttgtgttaacatggaagagga

SEQ ID NO: 69900 - DNA, 22 bp, synthetic construct
  misc_feature 1..22: note = chemically synthesized
  source 1..22: mol_type = other DNA
gtgttaacatggaagaggattc

SEQ ID NO: 69901 - DNA, 22 bp, synthetic construct
  misc_feature 1..22: note = chemically synthesized
  source 1..22: mol_type = other DNA
tgttaacatggaagaggattca

SEQ ID NO: 69902 - DNA, 22 bp, synthetic construct
  misc_feature 1..22: note = chemically synthesized
  source 1..22: mol_type = other DNA
acatggaagaggattcattgtt

SEQ ID NO: 69903 - DNA, 22 bp, synthetic construct
  misc_feature 1..22: note = chemically synthesized
  source 1..22: mol_type = other DNA
attgtttttatttttatttttt

SEQ ID NO: 69904 - DNA, 22 bp, synthetic construct
  misc_feature 1..22: note = chemically synthesized
  source 1..22: mol_type = other DNA
tttttatttttatttttttaat

SEQ ID NO: 69905 - DNA, 22 bp, synthetic construct
  misc_feature 1..22: note = chemically synthesized
  source 1..22: mol_type = other DNA
ttatttttatttttttaatttt

SEQ ID NO: 69906 - DNA, 22 bp, synthetic construct
  misc_feature 1..22: note = chemically synthesized
  source 1..22: mol_type = other DNA
tatttttatttttttaattttt

SEQ ID NO: 69907 - DNA, 22 bp, synthetic construct
  misc_feature 1..22: note = chemically synthesized
  source 1..22: mol_type = other DNA
atttttatttttttaatttttt

SEQ ID NO: 69908 - DNA, 22 bp, synthetic construct
  misc_feature 1..22: note = chemically synthesized
  source 1..22: mol_type = other DNA
tttttatttttttaattttttc

SEQ ID NO: 69909 - DNA, 22 bp, synthetic construct
  misc_feature 1..22: note = chemically synthesized
  source 1..22: mol_type = other DNA
ttatttttttaattttttcttt

SEQ ID NO: 69910 - DNA, 22 bp, synthetic construct
  misc_feature 1..22: note = chemically synthesized
  source 1..22: mol_type = other DNA
tatttttttaattttttctttt

SEQ ID NO: 69911 - DNA, 22 bp, synthetic construct
  misc_feature 1..22: note = chemically synthesized
  source 1..22: mol_type = other DNA
atttttttaattttttcttttt

SEQ ID NO: 69912 - DNA, 22 bp, synthetic construct
  misc_feature 1..22: note = chemically synthesized
  source 1..22: mol_type = other DNA
tttttttaattttttctttttt

SEQ ID NO: 69913 - DNA, 22 bp, synthetic construct
  misc_feature 1..22: note = chemically synthesized
  source 1..22: mol_type = other DNA
ttttaattttttcttttttatt

SEQ ID NO: 69914 - DNA, 22 bp, synthetic construct
  misc_feature 1..22: note = chemically synthesized
  source 1..22: mol_type = other DNA
tttaattttttcttttttatta

SEQ ID NO: 69915 - DNA, 22 bp, synthetic construct
  misc_feature 1..22: note = chemically synthesized
  source 1..22: mol_type = other DNA
ttaattttttcttttttattaa

SEQ ID NO: 69916 - DNA, 22 bp, synthetic construct
  misc_feature 1..22: note = chemically synthesized
  source 1..22: mol_type = other DNA
taattttttcttttttattaag

SEQ ID NO: 69917 - DNA, 22 bp, synthetic construct
  misc_feature 1..22: note = chemically synthesized
  source 1..22: mol_type = other DNA
aattttttcttttttattaagc

SEQ ID NO: 69918 - DNA, 22 bp, synthetic construct
  misc_feature 1..22: note = chemically synthesized
  source 1..22: mol_type = other DNA
attttttcttttttattaagct

SEQ ID NO: 69919 - DNA, 22 bp, synthetic construct
  misc_feature 1..22: note = chemically synthesized
  source 1..22: mol_type = other DNA
tttcttttttattaagctagca

SEQ ID NO: 69920 - DNA, 22 bp, synthetic construct
  misc_feature 1..22: note = chemically synthesized
  source 1..22: mol_type = other DNA
ttcttttttattaagctagcat

SEQ ID NO: 69921 - DNA, 22 bp, synthetic construct
  misc_feature 1..22: note = chemically synthesized
  source 1..22: mol_type = other DNA
tcttttttattaagctagcatc

SEQ ID NO: 69922 - DNA, 22 bp, synthetic construct
  misc_feature 1..22: note = chemically synthesized
  source 1..22: mol_type = other DNA
cttttttattaagctagcatct

SEQ ID NO: 69923 - DNA, 22 bp, synthetic construct
  misc_feature 1..22: note = chemically synthesized
  source 1..22: mol_type = other DNA
ttttttattaagctagcatctg

SEQ ID NO: 69924 - DNA, 22 bp, synthetic construct
  misc_feature 1..22: note = chemically synthesized
  source 1..22: mol_type = other DNA
ttttattaagctagcatctgcc

SEQ ID NO: 69925 - DNA, 22 bp, synthetic construct
  misc_feature 1..22: note = chemically synthesized
  source 1..22: mol_type = other DNA
tttattaagctagcatctgccc

SEQ ID NO: 69926 - DNA, 22 bp, synthetic construct
  misc_feature 1..22: note = chemically synthesized
  source 1..22: mol_type = other DNA
ttattaagctagcatctgcccc

SEQ ID NO: 69927 - DNA, 22 bp, synthetic construct
  misc_feature 1..22: note = chemically synthesized
  source 1..22: mol_type = other DNA
tattaagctagcatctgcccca

SEQ ID NO: 69928 - DNA, 22 bp, synthetic construct
  misc_feature 1..22: note = chemically synthesized
  source 1..22: mol_type = other DNA
attaagctagcatctgccccag

SEQ ID NO: 69929 - DNA, 22 bp, synthetic construct
  misc_feature 1..22: note = chemically synthesized
  source 1..22: mol_type = other DNA
ttaagctagcatctgccccagt

SEQ ID NO: 69930 - DNA, 22 bp, synthetic construct
  misc_feature 1..22: note = chemically synthesized
  source 1..22: mol_type = other DNA
agctagcatctgccccagttgg

SEQ ID NO: 69931 - DNA, 22 bp, synthetic construct
  misc_feature 1..22: note = chemically synthesized
  source 1..22: mol_type = other DNA
gcatctgccccagttggtgttc

SEQ ID NO: 69932 - DNA, 22 bp, synthetic construct
  misc_feature 1..22: note = chemically synthesized
  source 1..22: mol_type = other DNA
ccccagttggtgttcaaatagc

SEQ ID NO: 69933 - DNA, 22 bp, synthetic construct
  misc_feature 1..22: note = chemically synthesized
  source 1..22: mol_type = other DNA
gtgttcaaatagcacttgactc

SEQ ID NO: 69934 - DNA, 22 bp, synthetic construct
  misc_feature 1..22: note = chemically synthesized
  source 1..22: mol_type = other DNA
aaatagcacttgactctgcctg

SEQ ID NO: 69935 - DNA, 22 bp, synthetic construct
  misc_feature 1..22: note = chemically synthesized
  source 1..22: mol_type = other DNA
gactctgcctgtgatatctgta

SEQ ID NO: 69936 - DNA, 22 bp, synthetic construct
  misc_feature 1..22: note = chemically synthesized
  source 1..22: mol_type = other DNA
actctgcctgtgatatctgtat

SEQ ID NO: 69937 - DNA, 22 bp, synthetic construct
  misc_feature 1..22: note = chemically synthesized
  source 1..22: mol_type = other DNA
tgcctgtgatatctgtatcttt

SEQ ID NO: 69938 - DNA, 22 bp, synthetic construct
  misc_feature 1..22: note = chemically synthesized
  source 1..22: mol_type = other DNA
cctgtgatatctgtatcttttc

SEQ ID NO: 69939 - DNA, 22 bp, synthetic construct
  misc_feature 1..22: note = chemically synthesized
  source 1..22: mol_type = other DNA
tgatatctgtatcttttctcta

SEQ ID NO: 69940 - DNA, 22 bp, synthetic construct
  misc_feature 1..22: note = chemically synthesized
  source 1..22: mol_type = other DNA
tatcttttctctaatcagagat

SEQ ID NO: 69941 - DNA, 22 bp, synthetic construct
  misc_feature 1..22: note = chemically synthesized
  source 1..22: mol_type = other DNA
ttctctaatcagagatacagag

SEQ ID NO: 69942 - DNA, 22 bp, synthetic construct
  misc_feature 1..22: note = chemically synthesized
  source 1..22: mol_type = other DNA
tctctaatcagagatacagagg

SEQ ID NO: 69943 - DNA, 22 bp, synthetic construct
  misc_feature 1..22: note = chemically synthesized
  source 1..22: mol_type = other DNA
ctctaatcagagatacagaggt

SEQ ID NO: 69944 - DNA, 22 bp, synthetic construct
  misc_feature 1..22: note = chemically synthesized
  source 1..22: mol_type = other DNA
tctaatcagagatacagaggtt

SEQ ID NO: 69945 - DNA, 22 bp, synthetic construct
  misc_feature 1..22: note = chemically synthesized
  source 1..22: mol_type = other DNA
taatcagagatacagaggttga

SEQ ID NO: 69946 - DNA, 22 bp, synthetic construct
  misc_feature 1..22: note = chemically synthesized
  source 1..22: mol_type = other DNA
atcagagatacagaggttgagt

SEQ ID NO: 69947 - DNA, 22 bp, synthetic construct
  misc_feature 1..22: note = chemically synthesized
  source 1..22: mol_type = other DNA
agtataaaataaacctgctcag

SEQ ID NO: 69948 - DNA, 22 bp, synthetic construct
  misc_feature 1..22: note = chemically synthesized
  source 1..22: mol_type = other DNA
ctcagataggacaattaagtgc

SEQ ID NO: 69949 - DNA, 22 bp, synthetic construct
  misc_feature 1..22: note = chemically synthesized
  source 1..22: mol_type = other DNA
agataggacaattaagtgcact

SEQ ID NO: 69950 - DNA, 22 bp, synthetic construct
  misc_feature 1..22: note = chemically synthesized
  source 1..22: mol_type = other DNA
agtgcactgtacaattttccca

SEQ ID NO: 69951 - DNA, 22 bp, synthetic construct
  misc_feature 1..22: note = chemically synthesized
  source 1..22: mol_type = other DNA
tacaattttcccagtttacagg

SEQ ID NO: 69952 - DNA, 22 bp, synthetic construct
  misc_feature 1..22: note = chemically synthesized
  source 1..22: mol_type = other DNA
tcccagtttacaggtctatact

SEQ ID NO: 69953 - DNA, 22 bp, synthetic construct
  misc_feature 1..22: note = chemically synthesized
  source 1..22: mol_type = other DNA
cccagtttacaggtctatactt

SEQ ID NO: 69954 - DNA, 22 bp, synthetic construct
  misc_feature 1..22: note = chemically synthesized
  source 1..22: mol_type = other DNA
ccagtttacaggtctatactta

SEQ ID NO: 69955 - DNA, 22 bp, synthetic construct
  misc_feature 1..22: note = chemically synthesized
  source 1..22: mol_type = other DNA
acaggtctatacttaagggaaa

SEQ ID NO: 69956 - DNA, 22 bp, synthetic construct
  misc_feature 1..22: note = chemically synthesized
  source 1..22: mol_type = other DNA
caggtctatacttaagggaaaa

SEQ ID NO: 69957 - DNA, 22 bp, synthetic construct
  misc_feature 1..22: note = chemically synthesized
  source 1..22: mol_type = other DNA
tacttaagggaaaagttgcaag

SEQ ID NO: 69958 - DNA, 22 bp, synthetic construct
  misc_feature 1..22: note = chemically synthesized
  source 1..22: mol_type = other DNA
aagggaaaagttgcaagaatgc

SEQ ID NO: 69959 - DNA, 22 bp, synthetic construct
  misc_feature 1..22: note = chemically synthesized
  source 1..22: mol_type = other DNA
agggaaaagttgcaagaatgct

SEQ ID NO: 69960 - DNA, 22 bp, synthetic construct
  misc_feature 1..22: note = chemically synthesized
  source 1..22: mol_type = other DNA
caagaatgctgaaaaaaaattg

SEQ ID NO: 69961 - DNA, 22 bp, synthetic construct
  misc_feature 1..22: note = chemically synthesized
  source 1..22: mol_type = other DNA
aaaaaaaattgaacacaatctc

SEQ ID NO: 69962 - DNA, 22 bp, synthetic construct
  misc_feature 1..22: note = chemically synthesized
  source 1..22: mol_type = other DNA
aacacaatctcattgaggagca

SEQ ID NO: 69963 - DNA, 22 bp, synthetic construct
  misc_feature 1..22: note = chemically synthesized
  source 1..22: mol_type = other DNA
attgaggagcattttttaaaaa

SEQ ID NO: 69964 - DNA, 22 bp, synthetic construct
  misc_feature 1..22: note = chemically synthesized
  source 1..22: mol_type = other DNA
aggagcattttttaaaaactaa

SEQ ID NO: 69965 - DNA, 22 bp, synthetic construct
  misc_feature 1..22: note = chemically synthesized
  source 1..22: mol_type = other DNA
tttaaaaactaaaaaaaaaaaa

SEQ ID NO: 69966 - DNA, 22 bp, synthetic construct
  misc_feature 1..22: note = chemically synthesized
  source 1..22: mol_type = other DNA
ttaaaaactaaaaaaaaaaaaa

SEQ ID NO: 69967 - DNA, 22 bp, synthetic construct
  misc_feature 1..22: note = chemically synthesized
  source 1..22: mol_type = other DNA
taaaaactaaaaaaaaaaaaac

SEQ ID NO: 69968 - DNA, 22 bp, synthetic construct
  misc_feature 1..22: note = chemically synthesized
  source 1..22: mol_type = other DNA
aaaaactaaaaaaaaaaaaact

SEQ ID NO: 69969 - DNA, 22 bp, synthetic construct
  misc_feature 1..22: note = chemically synthesized
  source 1..22: mol_type = other DNA
aaaactaaaaaaaaaaaaactt

SEQ ID NO: 69970 - DNA, 22 bp, synthetic construct
  misc_feature 1..22: note = chemically synthesized
  source 1..22: mol_type = other DNA
aaaaaaaaaaaactttgccagc

SEQ ID NO: 69971 - DNA, 22 bp, synthetic construct
  misc_feature 1..22: note = chemically synthesized
  source 1..22: mol_type = other DNA
tgccagccatttacttgactat

SEQ ID NO: 69972 - DNA, 22 bp, synthetic construct
  misc_feature 1..22: note = chemically synthesized
  source 1..22: mol_type = other DNA
gccagccatttacttgactatt

SEQ ID NO: 69973 - DNA, 22 bp, synthetic construct
  misc_feature 1..22: note = chemically synthesized
  source 1..22: mol_type = other DNA
ccagccatttacttgactattg

SEQ ID NO: 69974 - DNA, 22 bp, synthetic construct
  misc_feature 1..22: note = chemically synthesized
  source 1..22: mol_type = other DNA
acttgactattgagcttactta

SEQ ID NO: 69975 - DNA, 22 bp, synthetic construct
  misc_feature 1..22: note = chemically synthesized
  source 1..22: mol_type = other DNA
cttgactattgagcttacttac

SEQ ID NO: 69976 - DNA, 22 bp, synthetic construct
  misc_feature 1..22: note = chemically synthesized
  source 1..22: mol_type = other DNA
gactattgagcttacttacttg

SEQ ID NO: 69977 - DNA, 22 bp, synthetic construct
  misc_feature 1..22: note = chemically synthesized
  source 1..22: mol_type = other DNA
actattgagcttacttacttgg

SEQ ID NO: 69978 - DNA, 22 bp, synthetic construct
  misc_feature 1..22: note = chemically synthesized
  source 1..22: mol_type = other DNA
ttgagcttacttacttggacgc

SEQ ID NO: 69979 - DNA, 22 bp, synthetic construct
  misc_feature 1..22: note = chemically synthesized
  source 1..22: mol_type = other DNA
agcttacttacttggacgcaac

SEQ ID NO: 69980 - DNA, 22 bp, synthetic construct
  misc_feature 1..22: note = chemically synthesized
  source 1..22: mol_type = other DNA
acttacttggacgcaacattgc

SEQ ID NO: 69981 - DNA, 22 bp, synthetic construct
  misc_feature 1..22: note = chemically synthesized
  source 1..22: mol_type = other DNA
cttacttggacgcaacattgca

SEQ ID NO: 69982 - DNA, 22 bp, synthetic construct
  misc_feature 1..22: note = chemically synthesized
  source 1..22: mol_type = other DNA
acttggacgcaacattgcaagc

SEQ ID NO: 69983 - DNA, 22 bp, synthetic construct
  misc_feature 1..22: note = chemically synthesized
  source 1..22: mol_type = other DNA
cttggacgcaacattgcaagcg

SEQ ID NO: 69984 - DNA, 22 bp, synthetic construct
  misc_feature 1..22: note = chemically synthesized
  source 1..22: mol_type = other DNA
ggacgcaacattgcaagcgctg

SEQ ID NO: 69985 - DNA, 22 bp, synthetic construct
  misc_feature 1..22: note = chemically synthesized
  source 1..22: mol_type = other DNA
gacgcaacattgcaagcgctgt

SEQ ID NO: 69986 - DNA, 22 bp, synthetic construct
  misc_feature 1..22: note = chemically synthesized
  source 1..22: mol_type = other DNA
caagcgctgtgaatggaaacag

SEQ ID NO: 69987 - DNA, 22 bp, synthetic construct
  misc_feature 1..22: note = chemically synthesized
  source 1..22: mol_type = other DNA
tgaatggaaacagaatacactt

SEQ ID NO: 69988 - DNA, 22 bp, synthetic construct
  misc_feature 1..22: note = chemically synthesized
  source 1..22: mol_type = other DNA
aacatagaaatgaatgattgct

SEQ ID NO: 69989 - DNA, 22 bp, synthetic construct
  misc_feature 1..22: note = chemically synthesized
  source 1..22: mol_type = other DNA
acatagaaatgaatgattgctt

SEQ ID NO: 69990 - DNA, 22 bp, synthetic construct
  misc_feature 1..22: note = chemically synthesized
  source 1..22: mol_type = other DNA
ctttcgcttctacagtgcaagg

SEQ ID NO: 69991 - DNA, 22 bp, synthetic construct
  misc_feature 1..22: note = chemically synthesized
  source 1..22: mol_type = other DNA
tcgcttctacagtgcaaggatt

SEQ ID NO: 69992 - DNA, 22 bp, synthetic construct
  misc_feature 1..22: note = chemically synthesized
  source 1..22: mol_type = other DNA
cgcttctacagtgcaaggattt

SEQ ID NO: 69993 - DNA, 22 bp, synthetic construct
  misc_feature 1..22: note = chemically synthesized
  source 1..22: mol_type = other DNA
gcttctacagtgcaaggatttt

SEQ ID NO: 69994 - DNA, 22 bp, synthetic construct
  misc_feature 1..22: note = chemically synthesized
  source 1..22: mol_type = other DNA
ctacagtgcaaggatttttttg

SEQ ID NO: 69995 - DNA, 22 bp, synthetic construct
  misc_feature 1..22: note = chemically synthesized
  source 1..22: mol_type = other DNA
tacagtgcaaggatttttttgt

SEQ ID NO: 69996 - DNA, 22 bp, synthetic construct
  misc_feature 1..22: note = chemically synthesized
  source 1..22: mol_type = other DNA
cagtgcaaggatttttttgtac

SEQ ID NO: 69997 - DNA, 22 bp, synthetic construct
  misc_feature 1..22: note = chemically synthesized
  source 1..22: mol_type = other DNA
ttttgtacaaaacttttttaaa

SEQ ID NO: 69998 - DNA, 22 bp, synthetic construct
  misc_feature 1..22: note = chemically synthesized
  source 1..22: mol_type = other DNA
tttgtacaaaacttttttaaat

SEQ ID NO: 69999 - DNA, 22 bp, synthetic construct
  misc_feature 1..22: note = chemically synthesized
  source 1..22: mol_type = other DNA
ttgtacaaaacttttttaaata

SEQ ID NO: 70000 - DNA, 22 bp, synthetic construct
  misc_feature 1..22: note = chemically synthesized
  source 1..22: mol_type = other DNA
tgtacaaaacttttttaaatat

SEQ ID NO: 70001 - DNA, 22 bp, synthetic construct
  misc_feature 1..22: note = chemically synthesized
  source 1..22: mol_type = other DNA
gtacaaaacttttttaaatata

SEQ ID NO: 70002 - DNA, 22 bp, synthetic construct
  misc_feature 1..22: note = chemically synthesized
  source 1..22: mol_type = other DNA
tacaaaacttttttaaatataa

SEQ ID NO: 70003 - DNA, 22 bp, synthetic construct
  misc_feature 1..22: note = chemically synthesized
  source 1..22: mol_type = other DNA
ttttaaatataaatgttaagaa

SEQ ID NO: 70004 - DNA, 22 bp, synthetic construct
  misc_feature 1..22: note = chemically synthesized
  source 1..22: mol_type = other DNA
tttaaatataaatgttaagaaa

SEQ ID NO: 70005 - DNA, 22 bp, synthetic construct
  misc_feature 1..22: note = chemically synthesized
  source 1..22: mol_type = other DNA
ttaaatataaatgttaagaaaa

SEQ ID NO: 70006 - DNA, 22 bp, synthetic construct
  misc_feature 1..22: note = chemically synthesized
  source 1..22: mol_type = other DNA
taaatataaatgttaagaaaaa

SEQ ID NO: 70007 - DNA, 22 bp, synthetic construct
  misc_feature 1..22: note = chemically synthesized
  source 1..22: mol_type = other DNA
aaatataaatgttaagaaaaat

SEQ ID NO: 70008 - DNA, 22 bp, synthetic construct
  misc_feature 1..22: note = chemically synthesized
  source 1..22: mol_type = other DNA
aatataaatgttaagaaaaatt

SEQ ID NO: 70009 - DNA, 22 bp, synthetic construct
  misc_feature 1..22: note = chemically synthesized
  source 1..22: mol_type = other DNA
agaaaaattttttttaaaaaac

SEQ ID NO: 70010 - DNA, 22 bp, synthetic construct
  misc_feature 1..22: note = chemically synthesized
  source 1..22: mol_type = other DNA
tttttaaaaaacacttcattat

SEQ ID NO: 70011 - DNA, 22 bp, synthetic construct
  misc_feature 1..22: note = chemically synthesized
  source 1..22: mol_type = other DNA
ttttaaaaaacacttcattatg

SEQ ID NO: 70012 - DNA, 22 bp, synthetic construct
  misc_feature 1..22: note = chemically synthesized
  source 1..22: mol_type = other DNA
tttaaaaaacacttcattatgt

SEQ ID NO: 70013 - DNA, 22 bp, synthetic construct
  misc_feature 1..22: note = chemically synthesized
  source 1..22: mol_type = other DNA
ttaaaaaacacttcattatgtt

SEQ ID NO: 70014 - DNA, 22 bp, synthetic construct
  misc_feature 1..22: note = chemically synthesized
  source 1..22: mol_type = other DNA
taaaaaacacttcattatgttt

SEQ ID NO: 70015 - DNA, 22 bp, synthetic construct
  misc_feature 1..22: note = chemically synthesized
  source 1..22: mol_type = other DNA
aaaaaacacttcattatgttta

SEQ ID NO: 70016 - DNA, 22 bp, synthetic construct
  misc_feature 1..22: note = chemically synthesized
  source 1..22: mol_type = other DNA
aaaaacacttcattatgtttag

SEQ ID NO: 70017 - DNA, 22 bp, synthetic construct
  misc_feature 1..22: note = chemically synthesized
  source 1..22: mol_type = other DNA
cattatgtttaggggggaactg

SEQ ID NO: 70018 - DNA, 22 bp, synthetic construct
  misc_feature 1..22: note = chemically synthesized
  source 1..22: mol_type = other DNA
attatgtttaggggggaactgc

SEQ ID NO: 70019 - DNA, 22 bp, synthetic construct
  misc_feature 1..22: note = chemically synthesized
  source 1..22: mol_type = other DNA
tgtttaggggggaactgcattt

SEQ ID NO: 70020 - DNA, 22 bp, synthetic construct
  misc_feature 1..22: note = chemically synthesized
  source 1..22: mol_type = other DNA
aggggggaactgcattttaggg

SEQ ID NO: 70021 - DNA, 22 bp, synthetic construct
  misc_feature 1..22: note = chemically synthesized
  source 1..22: mol_type = other DNA
ggggggaactgcattttagggt

SEQ ID NO: 70022 - DNA, 22 bp, synthetic construct
  misc_feature 1..22: note = chemically synthesized
  source 1..22: mol_type = other DNA
cattttagggttccattgtctt

SEQ ID NO: 70023 - DNA, 22 bp, synthetic construct
  misc_feature 1..22: note = chemically synthesized
  source 1..22: mol_type = other DNA
tagggttccattgtcttggtgg

SEQ ID NO: 70024 - DNA, 22 bp, synthetic construct
  misc_feature 1..22: note = chemically synthesized
  source 1..22: mol_type = other DNA
agggttccattgtcttggtggt

SEQ ID NO: 70025 - DNA, 22 bp, synthetic construct
  misc_feature 1..22: note = chemically synthesized
  source 1..22: mol_type = other DNA
gggttccattgtcttggtggtg

SEQ ID NO: 70026 - DNA, 22 bp, synthetic construct
  misc_feature 1..22: note = chemically synthesized
  source 1..22: mol_type = other DNA
cattgtcttggtggtgttacaa

SEQ ID NO: 70027 - DNA, 22 bp, synthetic construct
  misc_feature 1..22: note = chemically synthesized
  source 1..22: mol_type = other DNA
tcttggtggtgttacaagactt

SEQ ID NO: 70028 - DNA, 22 bp, synthetic construct
  misc_feature 1..22: note = chemically synthesized
  source 1..22: mol_type = other DNA
ggtggtgttacaagacttgtta

SEQ ID NO: 70029 - DNA, 22 bp, synthetic construct
  misc_feature 1..22: note = chemically synthesized
  source 1..22: mol_type = other DNA
gtggtgttacaagacttgttat

SEQ ID NO: 70030 - DNA, 22 bp, synthetic construct
  misc_feature 1..22: note = chemically synthesized
  source 1..22: mol_type = other DNA
caagacttgttatccatttaaa

SEQ ID NO: 70031 - DNA, 22 bp, synthetic construct
  misc_feature 1..22: note = chemically synthesized
  source 1..22: mol_type = other DNA
gttatccatttaaaaatggtag

SEQ ID NO: 70032 - DNA, 22 bp, synthetic construct
  misc_feature 1..22: note = chemically synthesized
  source 1..22: mol_type = other DNA
ttatccatttaaaaatggtagt

SEQ ID NO: 70033 - DNA, 22 bp, synthetic construct
  misc_feature 1..22: note = chemically synthesized
  source 1..22: mol_type = other DNA
tccatttaaaaatggtagtgga

SEQ ID NO: 70034 - DNA, 22 bp, synthetic construct
  misc_feature 1..22: note = chemically synthesized
  source 1..22: mol_type = other DNA
aaaaatggtagtggaaattcta

SEQ ID NO: 70035 - DNA, 22 bp, synthetic construct
  misc_feature 1..22: note = chemically synthesized
  source 1..22: mol_type = other DNA
aaaatggtagtggaaattctat

SEQ ID NO: 70036 - DNA, 22 bp, synthetic construct
  misc_feature 1..22: note = chemically synthesized
  source 1..22: mol_type = other DNA
tatgccttggatacacaccgct

SEQ ID NO: 70037 - DNA, 22 bp, synthetic construct
  misc_feature 1..22: note = chemically synthesized
  source 1..22: mol_type = other DNA
tgccttggatacacaccgctct

SEQ ID NO: 70038 - DNA, 22 bp, synthetic construct
  misc_feature 1..22: note = chemically synthesized
  source 1..22: mol_type = other DNA
ggatacacaccgctcttcaggt

SEQ ID NO: 70039 - DNA, 22 bp, synthetic construct
  misc_feature 1..22: note = chemically synthesized
  source 1..22: mol_type = other DNA
gatacacaccgctcttcaggtt

SEQ ID NO: 70040 - DNA, 22 bp, synthetic construct
  misc_feature 1..22: note = chemically synthesized
  source 1..22: mol_type = other DNA
ttcaggttgtaaaaaaaaaaaa

SEQ ID NO: 70041 - DNA, 22 bp, synthetic construct
  misc_feature 1..22: note = chemically synthesized
  source 1..22: mol_type = other DNA
caggttgtaaaaaaaaaaaaca

SEQ ID NO: 70042 - DNA, 22 bp, synthetic construct
  misc_feature 1..22: note = chemically synthesized
  source 1..22: mol_type = other DNA
aggttgtaaaaaaaaaaaacat

SEQ ID NO: 70043 - DNA, 22 bp, synthetic construct
  misc_feature 1..22: note = chemically synthesized
  source 1..22: mol_type = other DNA
taaaaaaaaaaaacatacattg

SEQ ID NO: 70044 - DNA, 22 bp, synthetic construct
  misc_feature 1..22: note = chemically synthesized
  source 1..22: mol_type = other DNA
gggaaaggtttaagattatata

SEQ ID NO: 70045 - DNA, 22 bp, synthetic construct
  misc_feature 1..22: note = chemically synthesized
  source 1..22: mol_type = other DNA
aagattatatagtacttaaata

SEQ ID NO: 70046 - DNA, 22 bp, synthetic construct
  misc_feature 1..22: note = chemically synthesized
  source 1..22: mol_type = other DNA
agattatatagtacttaaatat

SEQ ID NO: 70047 - DNA, 22 bp, synthetic construct
  misc_feature 1..22: note = chemically synthesized
  source 1..22: mol_type = other DNA
tatagtacttaaatataggaaa

SEQ ID NO: 70048 - DNA, 22 bp, synthetic construct
  misc_feature 1..22: note = chemically synthesized
  source 1..22: mol_type = other DNA
aaatataggaaaatgcacactc

SEQ ID NO: 70049 - DNA, 22 bp, synthetic construct
  misc_feature 1..22: note = chemically synthesized
  source 1..22: mol_type = other DNA
aatataggaaaatgcacactca

SEQ ID NO: 70050 - DNA, 22 bp, synthetic construct
  misc_feature 1..22: note = chemically synthesized
  source 1..22: mol_type = other DNA
atgttgattcctatgctaaaat

SEQ ID NO: 70051 - DNA, 22 bp, synthetic construct
  misc_feature 1..22: note = chemically synthesized
  source 1..22: mol_type = other DNA
attcctatgctaaaatacattt

SEQ ID NO: 70052 - DNA, 22 bp, synthetic construct
  misc_feature 1..22: note = chemically synthesized
  source 1..22: mol_type = other DNA
ctatgctaaaatacatttatgg

SEQ ID NO: 70053 - DNA, 22 bp, synthetic construct
  misc_feature 1..22: note = chemically synthesized
  source 1..22: mol_type = other DNA
tgctaaaatacatttatggtct

SEQ ID NO: 70054 - DNA, 22 bp, synthetic construct
  misc_feature 1..22: note = chemically synthesized
  source 1..22: mol_type = other DNA
aaatacatttatggtctttttt

SEQ ID NO: 70055 - DNA, 22 bp, synthetic construct
  misc_feature 1..22: note = chemically synthesized
  source 1..22: mol_type = other DNA
atggtcttttttctgtatttct

SEQ ID NO: 70056 - DNA, 22 bp, synthetic construct
  misc_feature 1..22: note = chemically synthesized
  source 1..22: mol_type = other DNA
tggtcttttttctgtatttcta

SEQ ID NO: 70057 - DNA, 22 bp, synthetic construct
  misc_feature 1..22: note = chemically synthesized
  source 1..22: mol_type = other DNA
ttttctgtatttctagaatggt

SEQ ID NO: 70058 - DNA, 22 bp, synthetic construct
  misc_feature 1..22: note = chemically synthesized
  source 1..22: mol_type = other DNA
tttctgtatttctagaatggta

SEQ ID NO: 70059 - DNA, 22 bp, synthetic construct
  misc_feature 1..22: note = chemically synthesized
  source 1..22: mol_type = other DNA
ttctgtatttctagaatggtat

SEQ ID NO: 70060 - DNA, 22 bp, synthetic construct
  misc_feature 1..22: note = chemically synthesized
  source 1..22: mol_type = other DNA
tctgtatttctagaatggtatt

SEQ ID NO: 70061 - DNA, 22 bp, synthetic construct
  misc_feature 1..22: note = chemically synthesized
  source 1..22: mol_type = other DNA
ctgtatttctagaatggtattt

SEQ ID NO: 70062 - DNA, 22 bp, synthetic construct
  misc_feature 1..22: note = chemically synthesized
  source 1..22: mol_type = other DNA
tgtatttctagaatggtatttg

SEQ ID NO: 70063 - DNA, 22 bp, synthetic construct
  misc_feature 1..22: note = chemically synthesized
  source 1..22: mol_type = other DNA
tatttctagaatggtatttgaa

SEQ ID NO: 70064 - DNA, 22 bp, synthetic construct
  misc_feature 1..22: note = chemically synthesized
  source 1..22: mol_type = other DNA
ctagaatggtatttgaattaaa

SEQ ID NO: 70065 - DNA, 22 bp, synthetic construct
  misc_feature 1..22: note = chemically synthesized
  source 1..22: mol_type = other DNA
tagaatggtatttgaattaaat

SEQ ID NO: 70066 - DNA, 22 bp, synthetic construct
  misc_feature 1..22: note = chemically synthesized
  source 1..22: mol_type = other DNA
gaatggtatttgaattaaatgt

SEQ ID NO: 70067 - DNA, 22 bp, synthetic construct
  misc_feature 1..22: note = chemically synthesized
  source 1..22: mol_type = other DNA
gaattaaatgttcatctagtgt

SEQ ID NO: 70068 - DNA, 22 bp, synthetic construct
  misc_feature 1..22: note = chemically synthesized
  source 1..22: mol_type = other DNA
aattaaatgttcatctagtgtt

SEQ ID NO: 70069 - DNA, 22 bp, synthetic construct
  misc_feature 1..22: note = chemically synthesized
  source 1..22: mol_type = other DNA
aatgttcatctagtgttaggca

SEQ ID NO: 70070 - DNA, 22 bp, synthetic construct
  misc_feature 1..22: note = chemically synthesized
  source 1..22: mol_type = other DNA
atctagtgttaggcactatagt

SEQ ID NO: 70071 - DNA, 22 bp, synthetic construct
  misc_feature 1..22: note = chemically synthesized
  source 1..22: mol_type = other DNA
gtgttaggcactatagtattta

SEQ ID NO: 70072 - DNA, 22 bp, synthetic construct
  misc_feature 1..22: note = chemically synthesized
  source 1..22: mol_type = other DNA
ggcactatagtatttatattga

SEQ ID NO: 70073 - DNA, 22 bp, synthetic construct
  misc_feature 1..22: note = chemically synthesized
  source 1..22: mol_type = other DNA
tagtatttatattgaagcttgt

SEQ ID NO: 70074 - DNA, 22 bp, synthetic construct
  misc_feature 1..22: note = chemically synthesized
  source 1..22: mol_type = other DNA
atattgaagcttgtatttttaa

SEQ ID NO: 70075 - DNA, 22 bp, synthetic construct
  misc_feature 1..22: note = chemically synthesized
  source 1..22: mol_type = other DNA
tattgaagcttgtatttttaac

SEQ ID NO: 70076 - DNA, 22 bp, synthetic construct
  misc_feature 1..22: note = chemically synthesized
  source 1..22: mol_type = other DNA
aagcttgtatttttaactgttg

SEQ ID NO: 70077 - DNA, 22 bp, synthetic construct
  misc_feature 1..22: note = chemically synthesized
  source 1..22: mol_type = other DNA
gtatttttaactgttgcttgtt

SEQ ID NO: 70078 - DNA, 22 bp, synthetic construct
  misc_feature 1..22: note = chemically synthesized
  source 1..22: mol_type = other DNA
tatttttaactgttgcttgttc

SEQ ID NO: 70079 - DNA, 22 bp, synthetic construct
  misc_feature 1..22: note = chemically synthesized
  source 1..22: mol_type = other DNA
ttaactgttgcttgttctctta

SEQ ID NO: 70080 - DNA, 22 bp, synthetic construct
  misc_feature 1..22: note = chemically synthesized
  source 1..22: mol_type = other DNA
taactgttgcttgttctcttaa

SEQ ID NO: 70081 - DNA, 22 bp, synthetic construct
  misc_feature 1..22: note = chemically synthesized
  source 1..22: mol_type = other DNA
aactgttgcttgttctcttaaa

SEQ ID NO: 70082 - DNA, 22 bp, synthetic construct
  misc_feature 1..22: note = chemically synthesized
  source 1..22: mol_type = other DNA
actgttgcttgttctcttaaaa

SEQ ID NO: 70083 - DNA, 22 bp, synthetic construct
  misc_feature 1..22: note = chemically synthesized
  source 1..22: mol_type = other DNA
ttgcttgttctcttaaaaggta

SEQ ID NO: 70084 - DNA, 22 bp, synthetic construct
  misc_feature 1..22: note = chemically synthesized
  source 1..22: mol_type = other DNA
cttgttctcttaaaaggtatca

SEQ ID NO: 70085 - DNA, 22 bp, synthetic construct
  misc_feature 1..22: note = chemically synthesized
  source 1..22: mol_type = other DNA
gttctcttaaaaggtatcaatg

SEQ ID NO: 70086 - DNA, 22 bp, synthetic construct
  misc_feature 1..22: note = chemically synthesized
  source 1..22: mol_type = other DNA
ttctcttaaaaggtatcaatgt

SEQ ID NO: 70087 - DNA, 22 bp, synthetic construct
  misc_feature 1..22: note = chemically synthesized
  source 1..22: mol_type = other DNA
tcttaaaaggtatcaatgtacc

SEQ ID NO: 70088 - DNA, 22 bp, synthetic construct
  misc_feature 1..22: note = chemically synthesized
  source 1..22: mol_type = other DNA
ttaaaaggtatcaatgtacctt

SEQ ID NO: 70089 - DNA, 22 bp, synthetic construct
  misc_feature 1..22: note = chemically synthesized
  source 1..22: mol_type = other DNA
aaaaggtatcaatgtacctttt

SEQ ID NO: 70090 - DNA, 22 bp, synthetic construct
  misc_feature 1..22: note = chemically synthesized
  source 1..22: mol_type = other DNA
aaaggtatcaatgtaccttttt

SEQ ID NO: 70091 - DNA, 22 bp, synthetic construct
  misc_feature 1..22: note = chemically synthesized
  source 1..22: mol_type = other DNA
ttttggtagtggaaaaaaaaaa

SEQ ID NO: 70092 - DNA, 22 bp, synthetic construct
  misc_feature 1..22: note = chemically synthesized
  source 1..22: mol_type = other DNA
tttggtagtggaaaaaaaaaag

SEQ ID NO: 70093 - DNA, 22 bp, synthetic construct
  misc_feature 1..22: note = chemically synthesized
  source 1..22: mol_type = other DNA
ttggtagtggaaaaaaaaaaga

SEQ ID NO: 70094 - DNA, 22 bp, synthetic construct
  misc_feature 1..22: note = chemically synthesized
  source 1..22: mol_type = other DNA
tggtagtggaaaaaaaaaagac

SEQ ID NO: 70095 - DNA, 22 bp, synthetic construct
  misc_feature 1..22: note = chemically synthesized
  source 1..22: mol_type = other DNA
ggtagtggaaaaaaaaaagaca

SEQ ID NO: 70096 - DNA, 22 bp, synthetic construct
  misc_feature 1..22: note = chemically synthesized
  source 1..22: mol_type = other DNA
gtagtggaaaaaaaaaagacag

SEQ ID NO: 70097 - DNA, 22 bp, synthetic construct
  misc_feature 1..22: note = chemically synthesized
  source 1..22: mol_type = other DNA
ccacagtatatttttttaattt

SEQ ID NO: 70098 - DNA, 22 bp, synthetic construct
  misc_feature 1..22: note = chemically synthesized
  source 1..22: mol_type = other DNA
ttttaatttggcaggataatat

SEQ ID NO: 70099 - DNA, 22 bp, synthetic construct
  misc_feature 1..22: note = chemically synthesized
  source 1..22: mol_type = other DNA
tttaatttggcaggataatata

SEQ ID NO: 70100 - DNA, 22 bp, synthetic construct
  misc_feature 1..22: note = chemically synthesized
  source 1..22: mol_type = other DNA
ttaatttggcaggataatatag

SEQ ID NO: 70101 - DNA, 22 bp, synthetic construct
  misc_feature 1..22: note = chemically synthesized
  source 1..22: mol_type = other DNA
taatttggcaggataatatagt

SEQ ID NO: 70102 - DNA, 22 bp, synthetic construct
  misc_feature 1..22: note = chemically synthesized
  source 1..22: mol_type = other DNA
aatttggcaggataatatagtg

SEQ ID NO: 70103 - DNA, 22 bp, synthetic construct
  misc_feature 1..22: note = chemically synthesized
  source 1..22: mol_type = other DNA
atttggcaggataatatagtgc

SEQ ID NO: 70104 - DNA, 22 bp, synthetic construct
  misc_feature 1..22: note = chemically synthesized
  source 1..22: mol_type = other DNA
ggcaggataatatagtgcaaat

SEQ ID NO: 70105 - DNA, 22 bp, synthetic construct
  misc_feature 1..22: note = chemically synthesized
  source 1..22: mol_type = other DNA
gcaggataatatagtgcaaatt

SEQ ID NO: 70106 - DNA, 22 bp, synthetic construct
  misc_feature 1..22: note = chemically synthesized
  source 1..22: mol_type = other DNA
tttgtatgcttcaaaaaaaaaa

SEQ ID NO: 70107 - DNA, 22 bp, synthetic construct
  misc_feature 1..22: note = chemically synthesized
  source 1..22: mol_type = other DNA
gtatgcttcaaaaaaaaaaaaa

SEQ ID NO: 70108 - DNA, 22 bp, synthetic construct
  misc_feature 1..22: note = chemically synthesized
  source 1..22: mol_type = other DNA
tatgcttcaaaaaaaaaaaaaa

SEQ ID NO: 70109 - DNA, 22 bp, synthetic construct
  misc_feature 1..22: note = chemically synthesized
  source 1..22: mol_type = other DNA
caaaaaaaaaaaaaagagagaa

SEQ ID NO: 70110 - DNA, 22 bp, synthetic construct
  misc_feature 1..22: note = chemically synthesized
  source 1..22: mol_type = other DNA
aaaaaaaaaaaaaagagagaaa

SEQ ID NO: 70111 - DNA, 22 bp, synthetic construct
  misc_feature 1..22: note = chemically synthesized
  source 1..22: mol_type = other DNA
cagatgagaagccatataatgg

SEQ ID NO: 70112 - DNA, 22 bp, synthetic construct
  misc_feature 1..22: note = chemically synthesized
  source 1..22: mol_type = other DNA
gggggagcctgctagaatgtca

SEQ ID NO: 70113 - DNA, 22 bp, synthetic construct
  misc_feature 1..22: note = chemically synthesized
  source 1..22: mol_type = other DNA
ggggagcctgctagaatgtcac

SEQ ID NO: 70114 - DNA, 22 bp, synthetic construct
  misc_feature 1..22: note = chemically synthesized
  source 1..22: mol_type = other DNA
ctagaatgtcacatggatggct

SEQ ID NO: 70115 - DNA, 22 bp, synthetic construct
  misc_feature 1..22: note = chemically synthesized
  source 1..22: mol_type = other DNA
gaatgtcacatggatggctgtc

SEQ ID NO: 70116 - DNA, 22 bp, synthetic construct
  misc_feature 1..22: note = chemically synthesized
  source 1..22: mol_type = other DNA
tcataggggttgtacatatcct

SEQ ID NO: 70117 - DNA, 22 bp, synthetic construct
  misc_feature 1..22: note = chemically synthesized
  source 1..22: mol_type = other DNA
tacatatccttttttgttcctt

SEQ ID NO: 70118 - DNA, 22 bp, synthetic construct
  misc_feature 1..22: note = chemically synthesized
  source 1..22: mol_type = other DNA
ttttgttcctttttcctgctgc

SEQ ID NO: 70119 - DNA, 22 bp, synthetic construct
  misc_feature 1..22: note = chemically synthesized
  source 1..22: mol_type = other DNA
tttgttcctttttcctgctgcc

SEQ ID NO: 70120 - DNA, 22 bp, synthetic construct
  misc_feature 1..22: note = chemically synthesized
  source 1..22: mol_type = other DNA
ttgttcctttttcctgctgcca

SEQ ID NO: 70121 - DNA, 22 bp, synthetic construct
  misc_feature 1..22: note = chemically synthesized
  source 1..22: mol_type = other DNA
tgttcctttttcctgctgccat

SEQ ID NO: 70122 - DNA, 22 bp, synthetic construct
  misc_feature 1..22: note = chemically synthesized
  source 1..22: mol_type = other DNA
gttcctttttcctgctgccata

SEQ ID NO: 70123 - DNA, 22 bp, synthetic construct
  misc_feature 1..22: note = chemically synthesized
  source 1..22: mol_type = other DNA
ttcctttttcctgctgccatac

SEQ ID NO: 70124 - DNA, 22 bp, synthetic construct
  misc_feature 1..22: note = chemically synthesized
  source 1..22: mol_type = other DNA
ctttttcctgctgccatactgt

SEQ ID NO: 70125 - DNA, 22 bp, synthetic construct
  misc_feature 1..22: note = chemically synthesized
  source 1..22: mol_type = other DNA
tttcctgctgccatactgtatg

SEQ ID NO: 70126 - DNA, 22 bp, synthetic construct
  misc_feature 1..22: note = chemically synthesized
  source 1..22: mol_type = other DNA
ttcctgctgccatactgtatgc

SEQ ID NO: 70127 - DNA, 22 bp, synthetic construct
  misc_feature 1..22: note = chemically synthesized
  source 1..22: mol_type = other DNA
tcctgctgccatactgtatgca

SEQ ID NO: 70128 - DNA, 22 bp, synthetic construct
  misc_feature 1..22: note = chemically synthesized
  source 1..22: mol_type = other DNA
cctgctgccatactgtatgcag

SEQ ID NO: 70129 - DNA, 22 bp, synthetic construct
  misc_feature 1..22: note = chemically synthesized
  source 1..22: mol_type = other DNA
ctgctgccatactgtatgcagt

SEQ ID NO: 70130 - DNA, 22 bp, synthetic construct
  misc_feature 1..22: note = chemically synthesized
  source 1..22: mol_type = other DNA
ctgccatactgtatgcagtact

SEQ ID NO: 70131 - DNA, 22 bp, synthetic construct
  misc_feature 1..22: note = chemically synthesized
  source 1..22: mol_type = other DNA
ccatactgtatgcagtactgca

SEQ ID NO: 70132 - DNA, 22 bp, synthetic construct
  misc_feature 1..22: note = chemically synthesized
  source 1..22: mol_type = other DNA
tatgcagtactgcaagctaata

SEQ ID NO: 70133 - DNA, 22 bp, synthetic construct
  misc_feature 1..22: note = chemically synthesized
  source 1..22: mol_type = other DNA
caagctaataacgttggtttgt

SEQ ID NO: 70134 - DNA, 22 bp, synthetic construct
  misc_feature 1..22: note = chemically synthesized
  source 1..22: mol_type = other DNA
ataacgttggtttgttatgtag

SEQ ID NO: 70135 - DNA, 22 bp, synthetic construct
  misc_feature 1..22: note = chemically synthesized
  source 1..22: mol_type = other DNA
gtttgttatgtagtgtgctttt

SEQ ID NO: 70136 - DNA, 22 bp, synthetic construct
  misc_feature 1..22: note = chemically synthesized
  source 1..22: mol_type = other DNA
gttatgtagtgtgctttttgtc

SEQ ID NO: 70137 - DNA, 22 bp, synthetic construct
  misc_feature 1..22: note = chemically synthesized
  source 1..22: mol_type = other DNA
ttatgtagtgtgctttttgtcc

SEQ ID NO: 70138 - DNA, 22 bp, synthetic construct
  misc_feature 1..22: note = chemically synthesized
  source 1..22: mol_type = other DNA
tgtagtgtgctttttgtccctt

SEQ ID NO: 70139 - DNA, 22 bp, synthetic construct
  misc_feature 1..22: note = chemically synthesized
  source 1..22: mol_type = other DNA
tttgtccctttccttctatcac

SEQ ID NO: 70140 - DNA, 22 bp, synthetic construct
  misc_feature 1..22: note = chemically synthesized
  source 1..22: mol_type = other DNA
ttgtccctttccttctatcacc

SEQ ID NO: 70141 - DNA, 22 bp, synthetic construct
  misc_feature 1..22: note = chemically synthesized
  source 1..22: mol_type = other DNA
tgtccctttccttctatcaccc

SEQ ID NO: 70142 - DNA, 22 bp, synthetic construct
  misc_feature 1..22: note = chemically synthesized
  source 1..22: mol_type = other DNA
gtccctttccttctatcaccct

SEQ ID NO: 70143 - DNA, 22 bp, synthetic construct
  misc_feature 1..22: note = chemically synthesized
  source 1..22: mol_type = other DNA
tccctttccttctatcacccta

SEQ ID NO: 70144 - DNA, 22 bp, synthetic construct
  misc_feature 1..22: note = chemically synthesized
  source 1..22: mol_type = other DNA
tccttctatcaccctacattcc

SEQ ID NO: 70145 - DNA, 22 bp, synthetic construct
  misc_feature 1..22: note = chemically synthesized
  source 1..22: mol_type = other DNA
ccttctatcaccctacattcca

SEQ ID NO: 70146 - DNA, 22 bp, synthetic construct
  misc_feature 1..22: note = chemically synthesized
  source 1..22: mol_type = other DNA
cttctatcaccctacattccag

SEQ ID NO: 70147 - DNA, 22 bp, synthetic construct
  misc_feature 1..22: note = chemically synthesized
  source 1..22: mol_type = other DNA
ctatcaccctacattccagcat

SEQ ID NO: 70148 - DNA, 22 bp, synthetic construct
  misc_feature 1..22: note = chemically synthesized
  source 1..22: mol_type = other DNA
tatcaccctacattccagcatc

SEQ ID NO: 70149 - DNA, 22 bp, synthetic construct
  misc_feature 1..22: note = chemically synthesized
  source 1..22: mol_type = other DNA
tcaccctacattccagcatctt

SEQ ID NO: 70150 - DNA, 22 bp, synthetic construct
  misc_feature 1..22: note = chemically synthesized
  source 1..22: mol_type = other DNA
cattccagcatcttaccttcat

SEQ ID NO: 70151 - DNA, 22 bp, synthetic construct
  misc_feature 1..22: note = chemically synthesized
  source 1..22: mol_type = other DNA
cagcatcttaccttcatatgca

SEQ ID NO: 70152 - DNA, 22 bp, synthetic construct
  misc_feature 1..22: note = chemically synthesized
  source 1..22: mol_type = other DNA
accttcatatgcagtaaaagaa

SEQ ID NO: 70153 - DNA, 22 bp, synthetic construct
  misc_feature 1..22: note = chemically synthesized
  source 1..22: mol_type = other DNA
ccttcatatgcagtaaaagaaa

SEQ ID NO: 70154 - DNA, 22 bp, synthetic construct
  misc_feature 1..22: note = chemically synthesized
  source 1..22: mol_type = other DNA
catatgcagtaaaagaaagaaa

SEQ ID NO: 70155 - DNA, 22 bp, synthetic construct
  misc_feature 1..22: note = chemically synthesized
  source 1..22: mol_type = other DNA
atatgcagtaaaagaaagaaag

SEQ ID NO: 70156 - DNA, 22 bp, synthetic construct
  misc_feature 1..22: note = chemically synthesized
  source 1..22: mol_type = other DNA
tgcagtttttttcattgccaaa

SEQ ID NO: 70157 - DNA, 22 bp, synthetic construct
  misc_feature 1..22: note = chemically synthesized
  source 1..22: mol_type = other DNA
gcagtttttttcattgccaaaa

SEQ ID NO: 70158 - DNA, 22 bp, synthetic construct
  misc_feature 1..22: note = chemically synthesized
  source 1..22: mol_type = other DNA
cagtttttttcattgccaaaaa

SEQ ID NO: 70159 - DNA, 22 bp, synthetic construct
  misc_feature 1..22: note = chemically synthesized
  source 1..22: mol_type = other DNA
ttttcattgccaaaaactaaat

SEQ ID NO: 70160 - DNA, 22 bp, synthetic construct
  misc_feature 1..22: note = chemically synthesized
  source 1..22: mol_type = other DNA
tttcattgccaaaaactaaatg

SEQ ID NO: 70161 - DNA, 22 bp, synthetic construct
  misc_feature 1..22: note = chemically synthesized
  source 1..22: mol_type = other DNA
ttcattgccaaaaactaaatgg

SEQ ID NO: 70162 - DNA, 22 bp, synthetic construct
  misc_feature 1..22: note = chemically synthesized
  source 1..22: mol_type = other DNA
tcattgccaaaaactaaatggt

SEQ ID NO: 70163 - DNA, 22 bp, synthetic construct
  misc_feature 1..22: note = chemically synthesized
  source 1..22: mol_type = other DNA
cattgccaaaaactaaatggtg

SEQ ID NO: 70164 - DNA, 22 bp, synthetic construct
  misc_feature 1..22: note = chemically synthesized
  source 1..22: mol_type = other DNA
attgccaaaaactaaatggtgc

SEQ ID NO: 70165 - DNA, 22 bp, synthetic construct
  misc_feature 1..22: note = chemically synthesized
  source 1..22: mol_type = other DNA
ccaaaaactaaatggtgcttta

SEQ ID NO: 70166 - DNA, 22 bp, synthetic construct
  misc_feature 1..22: note = chemically synthesized
  source 1..22: mol_type = other DNA
aatggtgctttatatttagatt

SEQ ID NO: 70167 - DNA, 22 bp, synthetic construct
  misc_feature 1..22: note = chemically synthesized
  source 1..22: mol_type = other DNA
tatatttagattggaaagaatt

SEQ ID NO: 70168 - DNA, 22 bp, synthetic construct
  misc_feature 1..22: note = chemically synthesized
  source 1..22: mol_type = other DNA
atatttagattggaaagaattt

SEQ ID NO: 70169 - DNA, 22 bp, synthetic construct
  misc_feature 1..22: note = chemically synthesized
  source 1..22: mol_type = other DNA
tatttagattggaaagaatttc

SEQ ID NO: 70170 - DNA, 22 bp, synthetic construct
  misc_feature 1..22: note = chemically synthesized
  source 1..22: mol_type = other DNA
agattggaaagaatttcatatg

SEQ ID NO: 70171 - DNA, 22 bp, synthetic construct
  misc_feature 1..22: note = chemically synthesized
  source 1..22: mol_type = other DNA
gattggaaagaatttcatatgc

SEQ ID NO: 70172 - DNA, 22 bp, synthetic construct
  misc_feature 1..22: note = chemically synthesized
  source 1..22: mol_type = other DNA
gaaagaatttcatatgcaaagc

SEQ ID NO: 70173 - DNA, 22 bp, synthetic construct
  misc_feature 1..22: note = chemically synthesized
  source 1..22: mol_type = other DNA
catatgcaaagcatattaaaga

SEQ ID NO: 70174 - DNA, 22 bp, synthetic construct
  misc_feature 1..22: note = chemically synthesized
  source 1..22: mol_type = other DNA
atatgcaaagcatattaaagag

SEQ ID NO: 70175 - DNA, 22 bp, synthetic construct
  misc_feature 1..22: note = chemically synthesized
  source 1..22: mol_type = other DNA
aagagaaagcccgctttagtca

SEQ ID NO: 70176 - DNA, 22 bp, synthetic construct
  misc_feature 1..22: note = chemically synthesized
  source 1..22: mol_type = other DNA
tagtcaatacttttttgtaaat

SEQ ID NO: 70177 - DNA, 22 bp, synthetic construct
  misc_feature 1..22: note = chemically synthesized
  source 1..22: mol_type = other DNA
agtcaatacttttttgtaaatg

SEQ ID NO: 70178 - DNA, 22 bp, synthetic construct
  misc_feature 1..22: note = chemically synthesized
  source 1..22: mol_type = other DNA
gtcaatacttttttgtaaatgg

SEQ ID NO: 70179 - DNA, 22 bp, synthetic construct
  misc_feature 1..22: note = chemically synthesized
  source 1..22: mol_type = other DNA
ttttgtaaatggcaatgcagaa

SEQ ID NO: 70180 - DNA, 22 bp, synthetic construct
  misc_feature 1..22: note = chemically synthesized
  source 1..22: mol_type = other DNA
tttgtaaatggcaatgcagaat

SEQ ID NO: 70181 - DNA, 22 bp, synthetic construct
  misc_feature 1..22: note = chemically synthesized
  source 1..22: mol_type = other DNA
ttgtaaatggcaatgcagaata

SEQ ID NO: 70182 - DNA, 22 bp, synthetic construct
  misc_feature 1..22: note = chemically synthesized
  source 1..22: mol_type = other DNA
tgtaaatggcaatgcagaatat

SEQ ID NO: 70183 - DNA, 22 bp, synthetic construct
  misc_feature 1..22: note = chemically synthesized
  source 1..22: mol_type = other DNA
gtaaatggcaatgcagaatatt

SEQ ID NO: 70184 - DNA, 22 bp, synthetic construct
  misc_feature 1..22: note = chemically synthesized
  source 1..22: mol_type = other DNA
taaatggcaatgcagaatattt

SEQ ID NO: 70185 - DNA, 22 bp, synthetic construct
  misc_feature 1..22: note = chemically synthesized
  source 1..22: mol_type = other DNA
tgttattggccttttctattcc

SEQ ID NO: 70186 - DNA, 22 bp, synthetic construct
  misc_feature 1..22: note = chemically synthesized
  source 1..22: mol_type = other DNA
gttattggccttttctattcct

SEQ ID NO: 70187 - DNA, 22 bp, synthetic construct
  misc_feature 1..22: note = chemically synthesized
  source 1..22: mol_type = other DNA
ttattggccttttctattcctg

SEQ ID NO: 70188 - DNA, 22 bp, synthetic construct
  misc_feature 1..22: note = chemically synthesized
  source 1..22: mol_type = other DNA
ttggccttttctattcctgtaa

SEQ ID NO: 70189 - DNA, 22 bp, synthetic construct
  misc_feature 1..22: note = chemically synthesized
  source 1..22: mol_type = other DNA
gccttttctattcctgtaatga

SEQ ID NO: 70190 - DNA, 22 bp, synthetic construct
  misc_feature 1..22: note = chemically synthesized
  source 1..22: mol_type = other DNA
ttctattcctgtaatgaaagct

SEQ ID NO: 70191 - DNA, 22 bp, synthetic construct
  misc_feature 1..22: note = chemically synthesized
  source 1..22: mol_type = other DNA
tctattcctgtaatgaaagctg

SEQ ID NO: 70192 - DNA, 22 bp, synthetic construct
  misc_feature 1..22: note = chemically synthesized
  source 1..22: mol_type = other DNA
ctattcctgtaatgaaagctgt

SEQ ID NO: 70193 - DNA, 22 bp, synthetic construct
  misc_feature 1..22: note = chemically synthesized
  source 1..22: mol_type = other DNA
tattcctgtaatgaaagctgtt

SEQ ID NO: 70194 - DNA, 22 bp, synthetic construct
  misc_feature 1..22: note = chemically synthesized
  source 1..22: mol_type = other DNA
ttcctgtaatgaaagctgtttg

SEQ ID NO: 70195 - DNA, 22 bp, synthetic construct
  misc_feature 1..22: note = chemically synthesized
  source 1..22: mol_type = other DNA
ctgtaatgaaagctgtttgtcg

SEQ ID NO: 70196 - DNA, 22 bp, synthetic construct
  misc_feature 1..22: note = chemically synthesized
  source 1..22: mol_type = other DNA
taatgaaagctgtttgtcgtaa

SEQ ID NO: 70197 - DNA, 22 bp, synthetic construct
  misc_feature 1..22: note = chemically synthesized
  source 1..22: mol_type = other DNA
tttgtcgtaacttgaaatttta

SEQ ID NO: 70198 - DNA, 22 bp, synthetic construct
  misc_feature 1..22: note = chemically synthesized
  source 1..22: mol_type = other DNA
gtcgtaacttgaaattttatct

SEQ ID NO: 70199 - DNA, 22 bp, synthetic construct
  misc_feature 1..22: note = chemically synthesized
  source 1..22: mol_type = other DNA
tcgtaacttgaaattttatctt

SEQ ID NO: 70200 - DNA, 22 bp, synthetic construct
  misc_feature 1..22: note = chemically synthesized
  source 1..22: mol_type = other DNA
gaaattttatcttttactatgg

SEQ ID NO: 70201 - DNA, 22 bp, synthetic construct
  misc_feature 1..22: note = chemically synthesized
  source 1..22: mol_type = other DNA
aaattttatcttttactatggg

SEQ ID NO: 70202 - DNA, 22 bp, synthetic construct
  misc_feature 1..22: note = chemically synthesized
  source 1..22: mol_type = other DNA
tatcttttactatgggagtcac

SEQ ID NO: 70203 - DNA, 22 bp, synthetic construct
  misc_feature 1..22: note = chemically synthesized
  source 1..22: mol_type = other DNA
atcttttactatgggagtcact

SEQ ID NO: 70204 - DNA, 22 bp, synthetic construct
  misc_feature 1..22: note = chemically synthesized
  source 1..22: mol_type = other DNA
tcttttactatgggagtcacta

SEQ ID NO: 70205 - DNA, 22 bp, synthetic construct
  misc_feature 1..22: note = chemically synthesized
  source 1..22: mol_type = other DNA
ttactatgggagtcactattta

SEQ ID NO: 70206 - DNA, 22 bp, synthetic construct
  misc_feature 1..22: note = chemically synthesized
  source 1..22: mol_type = other DNA
tactatgggagtcactatttat

SEQ ID NO: 70207 - DNA, 22 bp, synthetic construct
  misc_feature 1..22: note = chemically synthesized
  source 1..22: mol_type = other DNA
actatgggagtcactatttatt

SEQ ID NO: 70208 - DNA, 22 bp, synthetic construct
  misc_feature 1..22: note = chemically synthesized
  source 1..22: mol_type = other DNA
ctatgggagtcactatttatta

SEQ ID NO: 70209 - DNA, 22 bp, synthetic construct
  misc_feature 1..22: note = chemically synthesized
  source 1..22: mol_type = other DNA
tgggagtcactatttattattg

SEQ ID NO: 70210 - DNA, 22 bp, synthetic construct
  misc_feature 1..22: note = chemically synthesized
  source 1..22: mol_type = other DNA
tttattattgcttatgtgccct

SEQ ID NO: 70211 - DNA, 22 bp, synthetic construct
  misc_feature 1..22: note = chemically synthesized
  source 1..22: mol_type = other DNA
attattgcttatgtgccctgtt

SEQ ID NO: 70212 - DNA, 22 bp, synthetic construct
  misc_feature 1..22: note = chemically synthesized
  source 1..22: mol_type = other DNA
ttattgcttatgtgccctgttc

SEQ ID NO: 70213 - DNA, 22 bp, synthetic construct
  misc_feature 1..22: note = chemically synthesized
  source 1..22: mol_type = other DNA
ttgcttatgtgccctgttcaaa

SEQ ID NO: 70214 - DNA, 22 bp, synthetic construct
  misc_feature 1..22: note = chemically synthesized
  source 1..22: mol_type = other DNA
cttatgtgccctgttcaaaaca

SEQ ID NO: 70215 - DNA, 22 bp, synthetic construct
  misc_feature 1..22: note = chemically synthesized
  source 1..22: mol_type = other DNA
atgtgccctgttcaaaacagag

SEQ ID NO: 70216 - DNA, 22 bp, synthetic construct
  misc_feature 1..22: note = chemically synthesized
  source 1..22: mol_type = other DNA
tgtgccctgttcaaaacagagg

SEQ ID NO: 70217 - DNA, 22 bp, synthetic construct
  misc_feature 1..22: note = chemically synthesized
  source 1..22: mol_type = other DNA
ttcaaaacagaggcacttaatt

SEQ ID NO: 70218 - DNA, 22 bp, synthetic construct
  misc_feature 1..22: note = chemically synthesized
  source 1..22: mol_type = other DNA
aaaacagaggcacttaatttga

SEQ ID NO: 70219 - DNA, 22 bp, synthetic construct
  misc_feature 1..22: note = chemically synthesized
  source 1..22: mol_type = other DNA
aatttgatcttttatttttctt

SEQ ID NO: 70220 - DNA, 22 bp, synthetic construct
  misc_feature 1..22: note = chemically synthesized
  source 1..22: mol_type = other DNA
atttgatcttttatttttcttt

SEQ ID NO: 70221 - DNA, 22 bp, synthetic construct
  misc_feature 1..22: note = chemically synthesized
  source 1..22: mol_type = other DNA
gatcttttatttttctttgttt

SEQ ID NO: 70222 - DNA, 22 bp, synthetic construct
  misc_feature 1..22: note = chemically synthesized
  source 1..22: mol_type = other DNA
atcttttatttttctttgtttt

SEQ ID NO: 70223 - DNA, 22 bp, synthetic construct
  misc_feature 1..22: note = chemically synthesized
  source 1..22: mol_type = other DNA
ttatttttctttgtttttattt

SEQ ID NO: 70224 - DNA, 22 bp, synthetic construct
  misc_feature 1..22: note = chemically synthesized
  source 1..22: mol_type = other DNA
tatttttctttgtttttatttt

SEQ ID NO: 70225 - DNA, 22 bp, synthetic construct
  misc_feature 1..22: note = chemically synthesized
  source 1..22: mol_type = other DNA
atttttctttgtttttattttt

SEQ ID NO: 70226 - DNA, 22 bp, synthetic construct
  misc_feature 1..22: note = chemically synthesized
  source 1..22: mol_type = other DNA
tttttctttgtttttatttttt

SEQ ID NO: 70227 - DNA, 22 bp, synthetic construct
  misc_feature 1..22: note = chemically synthesized
  source 1..22: mol_type = other DNA
ttctttgtttttattttttttt

SEQ ID NO: 70228 - DNA, 22 bp, synthetic construct
  misc_feature 1..22: note = chemically synthesized
  source 1..22: mol_type = other DNA
tctttgtttttatttttttttt

SEQ ID NO: 70229 - DNA, 22 bp, synthetic construct
  misc_feature 1..22: note = chemically synthesized
  source 1..22: mol_type = other DNA
ctttgtttttattttttttttt

SEQ ID NO: 70230 - DNA, 22 bp, synthetic construct
  misc_feature 1..22: note = chemically synthesized
  source 1..22: mol_type = other DNA
tttgtttttattttttttttta

SEQ ID NO: 70231 - DNA, 22 bp, synthetic construct
  misc_feature 1..22: note = chemically synthesized
  source 1..22: mol_type = other DNA
tgtttttatttttttttttatt

SEQ ID NO: 70232 - DNA, 22 bp, synthetic construct
  misc_feature 1..22: note = chemically synthesized
  source 1..22: mol_type = other DNA
gtttttatttttttttttattt

SEQ ID NO: 70233 - DNA, 22 bp, synthetic construct
  misc_feature 1..22: note = chemically synthesized
  source 1..22: mol_type = other DNA
tttttatttttttttttattta

SEQ ID NO: 70234 - DNA, 22 bp, synthetic construct
  misc_feature 1..22: note = chemically synthesized
  source 1..22: mol_type = other DNA
ttatttttttttttatttagat

SEQ ID NO: 70235 - DNA, 22 bp, synthetic construct
  misc_feature 1..22: note = chemically synthesized
  source 1..22: mol_type = other DNA
tatttttttttttatttagatg

SEQ ID NO: 70236 - DNA, 22 bp, synthetic construct
  misc_feature 1..22: note = chemically synthesized
  source 1..22: mol_type = other DNA
atttttttttttatttagatga

SEQ ID NO: 70237 - DNA, 22 bp, synthetic construct
  misc_feature 1..22: note = chemically synthesized
  source 1..22: mol_type = other DNA
tttttttttttatttagatgac

SEQ ID NO: 70238 - DNA, 22 bp, synthetic construct
  misc_feature 1..22: note = chemically synthesized
  source 1..22: mol_type = other DNA
ttttttttatttagatgaccaa

SEQ ID NO: 70239 - DNA, 22 bp, synthetic construct
  misc_feature 1..22: note = chemically synthesized
  source 1..22: mol_type = other DNA
tttttttatttagatgaccaaa

SEQ ID NO: 70240 - DNA, 22 bp, synthetic construct
  misc_feature 1..22: note = chemically synthesized
  source 1..22: mol_type = other DNA
ttttttatttagatgaccaaag

SEQ ID NO: 70241 - DNA, 22 bp, synthetic construct
  misc_feature 1..22: note = chemically synthesized
  source 1..22: mol_type = other DNA
tttttatttagatgaccaaagg

SEQ ID NO: 70242 - DNA, 22 bp, synthetic construct
  misc_feature 1..22: note = chemically synthesized
  source 1..22: mol_type = other DNA
ttttatttagatgaccaaaggt

SEQ ID NO: 70243 - DNA, 22 bp, synthetic construct
  misc_feature 1..22: note = chemically synthesized
  source 1..22: mol_type = other DNA
tttatttagatgaccaaaggtc

SEQ ID NO: 70244 - DNA, 22 bp, synthetic construct
  misc_feature 1..22: note = chemically synthesized
  source 1..22: mol_type = other DNA
ttatttagatgaccaaaggtca

SEQ ID NO: 70245 - DNA, 22 bp, synthetic construct
  misc_feature 1..22: note = chemically synthesized
  source 1..22: mol_type = other DNA
tatttagatgaccaaaggtcat

SEQ ID NO: 70246 - DNA, 22 bp, synthetic construct
  misc_feature 1..22: note = chemically synthesized
  source 1..22: mol_type = other DNA
atttagatgaccaaaggtcatt

SEQ ID NO: 70247 - DNA, 22 bp, synthetic construct
  misc_feature 1..22: note = chemically synthesized
  source 1..22: mol_type = other DNA
tttagatgaccaaaggtcatta

SEQ ID NO: 70248 - DNA, 22 bp, synthetic construct
  misc_feature 1..22: note = chemically synthesized
  source 1..22: mol_type = other DNA
agatgaccaaaggtcattacaa

SEQ ID NO: 70249 - DNA, 22 bp, synthetic construct
  misc_feature 1..22: note = chemically synthesized
  source 1..22: mol_type = other DNA
gatgaccaaaggtcattacaac

SEQ ID NO: 70250 - DNA, 22 bp, synthetic construct
  misc_feature 1..22: note = chemically synthesized
  source 1..22: mol_type = other DNA
caacctggctttttattgtatt

SEQ ID NO: 70251 - DNA, 22 bp, synthetic construct
  misc_feature 1..22: note = chemically synthesized
  source 1..22: mol_type = other DNA
gctttttattgtatttgtttct

SEQ ID NO: 70252 - DNA, 22 bp, synthetic construct
  misc_feature 1..22: note = chemically synthesized
  source 1..22: mol_type = other DNA
tttattgtatttgtttctggtc

SEQ ID NO: 70253 - DNA, 22 bp, synthetic construct
  misc_feature 1..22: note = chemically synthesized
  source 1..22: mol_type = other DNA
ttattgtatttgtttctggtct

SEQ ID NO: 70254 - DNA, 22 bp, synthetic construct
  misc_feature 1..22: note = chemically synthesized
  source 1..22: mol_type = other DNA
tattgtatttgtttctggtctt

SEQ ID NO: 70255 - DNA, 22 bp, synthetic construct
  misc_feature 1..22: note = chemically synthesized
  source 1..22: mol_type = other DNA
attgtatttgtttctggtcttt

SEQ ID NO: 70256 - DNA, 22 bp, synthetic construct
  misc_feature 1..22: note = chemically synthesized
  source 1..22: mol_type = other DNA
ttgtatttgtttctggtctttg

SEQ ID NO: 70257 - DNA, 22 bp, synthetic construct
  misc_feature 1..22: note = chemically synthesized
  source 1..22: mol_type = other DNA
tatttgtttctggtctttgtta

SEQ ID NO: 70258 - DNA, 22 bp, synthetic construct
  misc_feature 1..22: note = chemically synthesized
  source 1..22: mol_type = other DNA
gtttctggtctttgttaagttc

SEQ ID NO: 70259 - DNA, 22 bp, synthetic construct
  misc_feature 1..22: note = chemically synthesized
  source 1..22: mol_type = other DNA
tttctggtctttgttaagttct

SEQ ID NO: 70260 - DNA, 22 bp, synthetic construct
  misc_feature 1..22: note = chemically synthesized
  source 1..22: mol_type = other DNA
ctggtctttgttaagttctatt

SEQ ID NO: 70261 - DNA, 22 bp, synthetic construct
  misc_feature 1..22: note = chemically synthesized
  source 1..22: mol_type = other DNA
tggtctttgttaagttctattg

SEQ ID NO: 70262 - DNA, 22 bp, synthetic construct
  misc_feature 1..22: note = chemically synthesized
  source 1..22: mol_type = other DNA
gtctttgttaagttctattgga

SEQ ID NO: 70263 - DNA, 22 bp, synthetic construct
  misc_feature 1..22: note = chemically synthesized
  source 1..22: mol_type = other DNA
tgttaagttctattggaaaaac

SEQ ID NO: 70264 - DNA, 22 bp, synthetic construct
  misc_feature 1..22: note = chemically synthesized
  source 1..22: mol_type = other DNA
gttaagttctattggaaaaacc

SEQ ID NO: 70265 - DNA, 22 bp, synthetic construct
  misc_feature 1..22: note = chemically synthesized
  source 1..22: mol_type = other DNA
ttaagttctattggaaaaacca

SEQ ID NO: 70266 - DNA, 22 bp, synthetic construct
  misc_feature 1..22: note = chemically synthesized
  source 1..22: mol_type = other DNA
agttctattggaaaaaccactg

SEQ ID NO: 70267 - DNA, 22 bp, synthetic construct
  misc_feature 1..22: note = chemically synthesized
  source 1..22: mol_type = other DNA
tattggaaaaaccactgtctgt

SEQ ID NO: 70268 - DNA, 22 bp, synthetic construct
  misc_feature 1..22: note = chemically synthesized
  source 1..22: mol_type = other DNA
ttggaaaaaccactgtctgtgt

SEQ ID NO: 70269 - DNA, 22 bp, synthetic construct
  misc_feature 1..22: note = chemically synthesized
  source 1..22: mol_type = other DNA
gaaaaaccactgtctgtgtttt

SEQ ID NO: 70270 - DNA, 22 bp, synthetic construct
  misc_feature 1..22: note = chemically synthesized
  source 1..22: mol_type = other DNA
tctgtgtttttttggcagttgt

SEQ ID NO: 70271 - DNA, 22 bp, synthetic construct
  misc_feature 1..22: note = chemically synthesized
  source 1..22: mol_type = other DNA
tgtttttttggcagttgtctgc

SEQ ID NO: 70272 - DNA, 22 bp, synthetic construct
  misc_feature 1..22: note = chemically synthesized
  source 1..22: mol_type = other DNA
ttttggcagttgtctgcattaa

SEQ ID NO: 70273 - DNA, 22 bp, synthetic construct
  misc_feature 1..22: note = chemically synthesized
  source 1..22: mol_type = other DNA
tttggcagttgtctgcattaac

SEQ ID NO: 70274 - DNA, 22 bp, synthetic construct
  misc_feature 1..22: note = chemically synthesized
  source 1..22: mol_type = other DNA
ttggcagttgtctgcattaacc

SEQ ID NO: 70275 - DNA, 22 bp, synthetic construct
  misc_feature 1..22: note = chemically synthesized
  source 1..22: mol_type = other DNA
tggcagttgtctgcattaacct

SEQ ID NO: 70276 - DNA, 22 bp, synthetic construct
  misc_feature 1..22: note = chemically synthesized
  source 1..22: mol_type = other DNA
ggcagttgtctgcattaacctg

SEQ ID NO: 70277 - DNA, 22 bp, synthetic construct
  misc_feature 1..22: note = chemically synthesized
  source 1..22: mol_type = other DNA
gcagttgtctgcattaacctgt

SEQ ID NO: 70278 - DNA, 22 bp, synthetic construct
  misc_feature 1..22: note = chemically synthesized
  source 1..22: mol_type = other DNA
tctgcattaacctgttcataca

SEQ ID NO: 70279 - DNA, 22 bp, synthetic construct
  misc_feature 1..22: note = chemically synthesized
  source 1..22: mol_type = other DNA
cattaacctgttcatacaccca

SEQ ID NO: 70280 - DNA, 22 bp, synthetic construct
  misc_feature 1..22: note = chemically synthesized
  source 1..22: mol_type = other DNA
acctgttcatacacccattttg

SEQ ID NO: 70281 - DNA, 22 bp, synthetic construct
  misc_feature 1..22: note = chemically synthesized
  source 1..22: mol_type = other DNA
ttcatacacccattttgtccct

SEQ ID NO: 70282 - DNA, 22 bp, synthetic construct
  misc_feature 1..22: note = chemically synthesized
  source 1..22: mol_type = other DNA
atacacccattttgtcccttta

SEQ ID NO: 70283 - DNA, 22 bp, synthetic construct
  misc_feature 1..22: note = chemically synthesized
  source 1..22: mol_type = other DNA
tgtccctttattgaaaaaataa

SEQ ID NO: 70284 - DNA, 22 bp, synthetic construct
  misc_feature 1..22: note = chemically synthesized
  source 1..22: mol_type = other DNA
gtccctttattgaaaaaataaa

SEQ ID NO: 70285 - DNA, 22 bp, synthetic construct
  misc_feature 1..22: note = chemically synthesized
  source 1..22: mol_type = other DNA
tccctttattgaaaaaataaaa

SEQ ID NO: 70286 - DNA, 22 bp, synthetic construct
  misc_feature 1..22: note = chemically synthesized
  source 1..22: mol_type = other DNA
tattgaaaaaataaaaaaaatt

SEQ ID NO: 70287 - DNA, 22 bp, synthetic construct
  misc_feature 1..22: note = chemically synthesized
  source 1..22: mol_type = other DNA
attgaaaaaataaaaaaaatta

SEQ ID NO: 70288 - DNA, 22 bp, synthetic construct
  misc_feature 1..22: note = chemically synthesized
  source 1..22: mol_type = other DNA
ttgaaaaaataaaaaaaattaa

SEQ ID NO: 70289 - DNA, 22 bp, synthetic construct
  misc_feature 1..22: note = chemically synthesized
  source 1..22: mol_type = other DNA
aaaaaataaaaaaaattaaagt

SEQ ID NO: 70290 - DNA, 22 bp, synthetic construct
  misc_feature 1..22: note = chemically synthesized
  source 1..22: mol_type = other DNA
aagtacacattgtaagcttctt

SEQ ID NO: 70291 - DNA, 22 bp, synthetic construct
  misc_feature 1..22: note = chemically synthesized
  source 1..22: mol_type = other DNA
taagcttcttgtgtcctcattt

SEQ ID NO: 70292 - DNA, 22 bp, synthetic construct
  misc_feature 1..22: note = chemically synthesized
  source 1..22: mol_type = other DNA
cttgtgtcctcatttgacacac

SEQ ID NO: 70293 - DNA, 22 bp, synthetic construct
  misc_feature 1..22: note = chemically synthesized
  source 1..22: mol_type = other DNA
ttgtgtcctcatttgacacact

SEQ ID NO: 70294 - DNA, 22 bp, synthetic construct
  misc_feature 1..22: note = chemically synthesized
  source 1..22: mol_type = other DNA
gtgtcctcatttgacacactct

SEQ ID NO: 70295 - DNA, 22 bp, synthetic construct
  misc_feature 1..22: note = chemically synthesized
  source 1..22: mol_type = other DNA
tgtcctcatttgacacactctg

SEQ ID NO: 70296 - DNA, 22 bp, synthetic construct
  misc_feature 1..22: note = chemically synthesized
  source 1..22: mol_type = other DNA
atttgacacactctgtaaatta

SEQ ID NO: 70297 - DNA, 22 bp, synthetic construct
  misc_feature 1..22: note = chemically synthesized
  source 1..22: mol_type = other DNA
gacacactctgtaaattacttg

SEQ ID NO: 70298 - DNA, 22 bp, synthetic construct
  misc_feature 1..22: note = chemically synthesized
  source 1..22: mol_type = other DNA
acacactctgtaaattacttgc

SEQ ID NO: 70299 - DNA, 22 bp, synthetic construct
  misc_feature 1..22: note = chemically synthesized
  source 1..22: mol_type = other DNA
tgtaaattacttgcaagaaaat

SEQ ID NO: 70300 - DNA, 22 bp, synthetic construct
  misc_feature 1..22: note = chemically synthesized
  source 1..22: mol_type = other DNA
taaattacttgcaagaaaataa

SEQ ID NO: 70301 - DNA, 22 bp, synthetic construct
  misc_feature 1..22: note = chemically synthesized
  source 1..22: mol_type = other DNA
cttgcaagaaaataacaggttt

SEQ ID NO: 70302 - DNA, 22 bp, synthetic construct
  misc_feature 1..22: note = chemically synthesized
  source 1..22: mol_type = other DNA
gcaagaaaataacaggttttaa

SEQ ID NO: 70303 - DNA, 22 bp, synthetic construct
  misc_feature 1..22: note = chemically synthesized
  source 1..22: mol_type = other DNA
caagaaaataacaggttttaag

SEQ ID NO: 70304 - DNA, 22 bp, synthetic construct
  misc_feature 1..22: note = chemically synthesized
  source 1..22: mol_type = other DNA
taagagaaggccagtcagtctt

SEQ ID NO: 70305 - DNA, 22 bp, synthetic construct
  misc_feature 1..22: note = chemically synthesized
  source 1..22: mol_type = other DNA
aagagaaggccagtcagtcttt

SEQ ID NO: 70306 - DNA, 22 bp, synthetic construct
  misc_feature 1..22: note = chemically synthesized
  source 1..22: mol_type = other DNA
agagaaggccagtcagtctttt

SEQ ID NO: 70307 - DNA, 22 bp, synthetic construct
  misc_feature 1..22: note = chemically synthesized
  source 1..22: mol_type = other DNA
tttcaggattatttctatgggc

SEQ ID NO: 70308 - DNA, 22 bp, synthetic construct
  misc_feature 1..22: note = chemically synthesized
  source 1..22: mol_type = other DNA
ttcaggattatttctatgggca

SEQ ID NO: 70309 - DNA, 22 bp, synthetic construct
  misc_feature 1..22: note = chemically synthesized
  source 1..22: mol_type = other DNA
tcaggattatttctatgggcat

SEQ ID NO: 70310 - DNA, 22 bp, synthetic construct
  misc_feature 1..22: note = chemically synthesized
  source 1..22: mol_type = other DNA
caggattatttctatgggcatt

SEQ ID NO: 70311 - DNA, 22 bp, synthetic construct
  misc_feature 1..22: note = chemically synthesized
  source 1..22: mol_type = other DNA
aggattatttctatgggcattc

SEQ ID NO: 70312 - DNA, 22 bp, synthetic construct
  misc_feature 1..22: note = chemically synthesized
  source 1..22: mol_type = other DNA
tttctatgggcattctgatgcg

SEQ ID NO: 70313 - DNA, 22 bp, synthetic construct
  misc_feature 1..22: note = chemically synthesized
  source 1..22: mol_type = other DNA
ctatgggcattctgatgcgtgt

SEQ ID NO: 70314 - DNA, 22 bp, synthetic construct
  misc_feature 1..22: note = chemically synthesized
  source 1..22: mol_type = other DNA
tatgggcattctgatgcgtgta

SEQ ID NO: 70315 - DNA, 22 bp, synthetic construct
  misc_feature 1..22: note = chemically synthesized
  source 1..22: mol_type = other DNA
tgggcattctgatgcgtgtatt

SEQ ID NO: 70316 - DNA, 22 bp, synthetic construct
  misc_feature 1..22: note = chemically synthesized
  source 1..22: mol_type = other DNA
tgatgcgtgtattataccctaa

SEQ ID NO: 70317 - DNA, 22 bp, synthetic construct
  misc_feature 1..22: note = chemically synthesized
  source 1..22: mol_type = other DNA
atgcgtgtattataccctaaag

SEQ ID NO: 70318 - DNA, 22 bp, synthetic construct
  misc_feature 1..22: note = chemically synthesized
  source 1..22: mol_type = other DNA
taccctaaaggaacataaagta

SEQ ID NO: 70319 - DNA, 22 bp, synthetic construct
  misc_feature 1..22: note = chemically synthesized
  source 1..22: mol_type = other DNA
aaggaacataaagtacttacta

SEQ ID NO: 70320 - DNA, 22 bp, synthetic construct
  misc_feature 1..22: note = chemically synthesized
  source 1..22: mol_type = other DNA
actatattaaaatagacatatc

SEQ ID NO: 70321 - DNA, 22 bp, synthetic construct
  misc_feature 1..22: note = chemically synthesized
  source 1..22: mol_type = other DNA
ctatattaaaatagacatatct

SEQ ID NO: 70322 - DNA, 22 bp, synthetic construct
  misc_feature 1..22: note = chemically synthesized
  source 1..22: mol_type = other DNA
tattaaaatagacatatctcaa

SEQ ID NO: 70323 - DNA, 22 bp, synthetic construct
  misc_feature 1..22: note = chemically synthesized
  source 1..22: mol_type = other DNA
aaatagacatatctcaaaccct

SEQ ID NO: 70324 - DNA, 22 bp, synthetic construct
  misc_feature 1..22: note = chemically synthesized
  source 1..22: mol_type = other DNA
aaaccctggacatagttttaag

SEQ ID NO: 70325 - DNA, 22 bp, synthetic construct
  misc_feature 1..22: note = chemically synthesized
  source 1..22: mol_type = other DNA
gacatagttttaaggctttcca

SEQ ID NO: 70326 - DNA, 22 bp, synthetic construct
  misc_feature 1..22: note = chemically synthesized
  source 1..22: mol_type = other DNA
taaggctttccagtttagaata

SEQ ID NO: 70327 - DNA, 22 bp, synthetic construct
  misc_feature 1..22: note = chemically synthesized
  source 1..22: mol_type = other DNA
aaggctttccagtttagaatag

SEQ ID NO: 70328 - DNA, 22 bp, synthetic construct
  misc_feature 1..22: note = chemically synthesized
  source 1..22: mol_type = other DNA
aggctttccagtttagaatagt

SEQ ID NO: 70329 - DNA, 22 bp, synthetic construct
  misc_feature 1..22: note = chemically synthesized
  source 1..22: mol_type = other DNA
tccagtttagaatagttttcaa

SEQ ID NO: 70330 - DNA, 22 bp, synthetic construct
  misc_feature 1..22: note = chemically synthesized
  source 1..22: mol_type = other DNA
ccagtttagaatagttttcaag

SEQ ID NO: 70331 - DNA, 22 bp, synthetic construct
  misc_feature 1..22: note = chemically synthesized
  source 1..22: mol_type = other DNA
cagtttagaatagttttcaaga

SEQ ID NO: 70332 - DNA, 22 bp, synthetic construct
  misc_feature 1..22: note = chemically synthesized
  source 1..22: mol_type = other DNA
agaatagttttcaagaaatgga

SEQ ID NO: 70333 - DNA, 22 bp, synthetic construct
  misc_feature 1..22: note = chemically synthesized
  source 1..22: mol_type = other DNA
gaatagttttcaagaaatggaa

SEQ ID NO: 70334 - DNA, 22 bp, synthetic construct
  misc_feature 1..22: note = chemically synthesized
  source 1..22: mol_type = other DNA
tcaagaaatggaaggtgttttc

SEQ ID NO: 70335 - DNA, 22 bp, synthetic construct
  misc_feature 1..22: note = chemically synthesized
  source 1..22: mol_type = other DNA
caagaaatggaaggtgttttca

SEQ ID NO: 70336 - DNA, 22 bp, synthetic construct
  misc_feature 1..22: note = chemically synthesized
  source 1..22: mol_type = other DNA
aagaaatggaaggtgttttcag

SEQ ID NO: 70337 - DNA, 22 bp, synthetic construct
  misc_feature 1..22: note = chemically synthesized
  source 1..22: mol_type = other DNA
tcagtctgatgttaaaaactta

SEQ ID NO: 70338 - DNA, 22 bp, synthetic construct
  misc_feature 1..22: note = chemically synthesized
  source 1..22: mol_type = other DNA
cagtctgatgttaaaaacttac

SEQ ID NO: 70339 - DNA, 22 bp, synthetic construct
  misc_feature 1..22: note = chemically synthesized
  source 1..22: mol_type = other DNA
agtctgatgttaaaaacttact

SEQ ID NO: 70340 - DNA, 22 bp, synthetic construct
  misc_feature 1..22: note = chemically synthesized
  source 1..22: mol_type = other DNA
atgttaaaaacttactccatct

SEQ ID NO: 70341 - DNA, 22 bp, synthetic construct
  misc_feature 1..22: note = chemically synthesized
  source 1..22: mol_type = other DNA
aaaacttactccatctcttagc

SEQ ID NO: 70342 - DNA, 22 bp, synthetic construct
  misc_feature 1..22: note = chemically synthesized
  source 1..22: mol_type = other DNA
actccatctcttagcagaaatc

SEQ ID NO: 70343 - DNA, 22 bp, synthetic construct
  misc_feature 1..22: note = chemically synthesized
  source 1..22: mol_type = other DNA
ctccatctcttagcagaaatcc

SEQ ID NO: 70344 - DNA, 22 bp, synthetic construct
  misc_feature 1..22: note = chemically synthesized
  source 1..22: mol_type = other DNA
catctcttagcagaaatccatt

SEQ ID NO: 70345 - DNA, 22 bp, synthetic construct
  misc_feature 1..22: note = chemically synthesized
  source 1..22: mol_type = other DNA
ttagcagaaatccattcaaaca

SEQ ID NO: 70346 - DNA, 22 bp, synthetic construct
  misc_feature 1..22: note = chemically synthesized
  source 1..22: mol_type = other DNA
agcagaaatccattcaaacata

SEQ ID NO: 70347 - DNA, 22 bp, synthetic construct
  misc_feature 1..22: note = chemically synthesized
  source 1..22: mol_type = other DNA
gcagaaatccattcaaacataa

SEQ ID NO: 70348 - DNA, 22 bp, synthetic construct
  misc_feature 1..22: note = chemically synthesized
  source 1..22: mol_type = other DNA
aaacataagtgaaaaaacttgc

SEQ ID NO: 70349 - DNA, 22 bp, synthetic construct
  misc_feature 1..22: note = chemically synthesized
  source 1..22: mol_type = other DNA
gctggtaatagcatcttaaact

SEQ ID NO: 70350 - DNA, 22 bp, synthetic construct
  misc_feature 1..22: note = chemically synthesized
  source 1..22: mol_type = other DNA
ctggtaatagcatcttaaactt

SEQ ID NO: 70351 - DNA, 22 bp, synthetic construct
  misc_feature 1..22: note = chemically synthesized
  source 1..22: mol_type = other DNA
gtaatagcatcttaaactttta

SEQ ID NO: 70352 - DNA, 22 bp, synthetic construct
  misc_feature 1..22: note = chemically synthesized
  source 1..22: mol_type = other DNA
aaacttttatttcctttaaatt

SEQ ID NO: 70353 - DNA, 22 bp, synthetic construct
  misc_feature 1..22: note = chemically synthesized
  source 1..22: mol_type = other DNA
aacttttatttcctttaaattt

SEQ ID NO: 70354 - DNA, 22 bp, synthetic construct
  misc_feature 1..22: note = chemically synthesized
  source 1..22: mol_type = other DNA
ttatttcctttaaattttttgc

SEQ ID NO: 70355 - DNA, 22 bp, synthetic construct
  misc_feature 1..22: note = chemically synthesized
  source 1..22: mol_type = other DNA
tatttcctttaaattttttgct

SEQ ID NO: 70356 - DNA, 22 bp, synthetic construct
  misc_feature 1..22: note = chemically synthesized
  source 1..22: mol_type = other DNA
atttcctttaaattttttgctg

SEQ ID NO: 70357 - DNA, 22 bp, synthetic construct
  misc_feature 1..22: note = chemically synthesized
  source 1..22: mol_type = other DNA
tttcctttaaattttttgctgt

SEQ ID NO: 70358 - DNA, 22 bp, synthetic construct
  misc_feature 1..22: note = chemically synthesized
  source 1..22: mol_type = other DNA
cctttaaattttttgctgttct

SEQ ID NO: 70359 - DNA, 22 bp, synthetic construct
  misc_feature 1..22: note = chemically synthesized
  source 1..22: mol_type = other DNA
ctttaaattttttgctgttctt

SEQ ID NO: 70360 - DNA, 22 bp, synthetic construct
  misc_feature 1..22: note = chemically synthesized
  source 1..22: mol_type = other DNA
taaattttttgctgttcttgtt

SEQ ID NO: 70361 - DNA, 22 bp, synthetic construct
  misc_feature 1..22: note = chemically synthesized
  source 1..22: mol_type = other DNA
aaattttttgctgttcttgttg

SEQ ID NO: 70362 - DNA, 22 bp, synthetic construct
  misc_feature 1..22: note = chemically synthesized
  source 1..22: mol_type = other DNA
aattttttgctgttcttgttgt

SEQ ID NO: 70363 - DNA, 22 bp, synthetic construct
  misc_feature 1..22: note = chemically synthesized
  source 1..22: mol_type = other DNA
tttgctgttcttgttgtctaaa

SEQ ID NO: 70364 - DNA, 22 bp, synthetic construct
  misc_feature 1..22: note = chemically synthesized
  source 1..22: mol_type = other DNA
ttgctgttcttgttgtctaaaa

SEQ ID NO: 70365 - DNA, 22 bp, synthetic construct
  misc_feature 1..22: note = chemically synthesized
  source 1..22: mol_type = other DNA
tgctgttcttgttgtctaaaag

SEQ ID NO: 70366 - DNA, 22 bp, synthetic construct
  misc_feature 1..22: note = chemically synthesized
  source 1..22: mol_type = other DNA
gctgttcttgttgtctaaaagt

SEQ ID NO: 70367 - DNA, 22 bp, synthetic construct
  misc_feature 1..22: note = chemically synthesized
  source 1..22: mol_type = other DNA
ctgttcttgttgtctaaaagtt

SEQ ID NO: 70368 - DNA, 22 bp, synthetic construct
  misc_feature 1..22: note = chemically synthesized
  source 1..22: mol_type = other DNA
ttcttgttgtctaaaagttctt

SEQ ID NO: 70369 - DNA, 22 bp, synthetic construct
  misc_feature 1..22: note = chemically synthesized
  source 1..22: mol_type = other DNA
ttgttgtctaaaagttcttttc

SEQ ID NO: 70370 - DNA, 22 bp, synthetic construct
  misc_feature 1..22: note = chemically synthesized
  source 1..22: mol_type = other DNA
gttgtctaaaagttcttttcta

SEQ ID NO: 70371 - DNA, 22 bp, synthetic construct
  misc_feature 1..22: note = chemically synthesized
  source 1..22: mol_type = other DNA
ttgtctaaaagttcttttctat

SEQ ID NO: 70372 - DNA, 22 bp, synthetic construct
  misc_feature 1..22: note = chemically synthesized
  source 1..22: mol_type = other DNA
tctaaaagttcttttctattct

SEQ ID NO: 70373 - DNA, 22 bp, synthetic construct
  misc_feature 1..22: note = chemically synthesized
  source 1..22: mol_type = other DNA
aaagttcttttctattctccca

SEQ ID NO: 70374 - DNA, 22 bp, synthetic construct
  misc_feature 1..22: note = chemically synthesized
  source 1..22: mol_type = other DNA
ttttctattctcccatccttgc

SEQ ID NO: 70375 - DNA, 22 bp, synthetic construct
  misc_feature 1..22: note = chemically synthesized
  source 1..22: mol_type = other DNA
ttctattctcccatccttgctt

SEQ ID NO: 70376 - DNA, 22 bp, synthetic construct
  misc_feature 1..22: note = chemically synthesized
  source 1..22: mol_type = other DNA
tctattctcccatccttgcttt

SEQ ID NO: 70377 - DNA, 22 bp, synthetic construct
  misc_feature 1..22: note = chemically synthesized
  source 1..22: mol_type = other DNA
ctattctcccatccttgcttta

SEQ ID NO: 70378 - DNA, 22 bp, synthetic construct
  misc_feature 1..22: note = chemically synthesized
  source 1..22: mol_type = other DNA
tattctcccatccttgctttat

SEQ ID NO: 70379 - DNA, 22 bp, synthetic construct
  misc_feature 1..22: note = chemically synthesized
  source 1..22: mol_type = other DNA
ttctcccatccttgctttatct

SEQ ID NO: 70380 - DNA, 22 bp, synthetic construct
  misc_feature 1..22: note = chemically synthesized
  source 1..22: mol_type = other DNA
tcccatccttgctttatcttag

SEQ ID NO: 70381 - DNA, 22 bp, synthetic construct
  misc_feature 1..22: note = chemically synthesized
  source 1..22: mol_type = other DNA
ccatccttgctttatcttagaa

SEQ ID NO: 70382 - DNA, 22 bp, synthetic construct
  misc_feature 1..22: note = chemically synthesized
  source 1..22: mol_type = other DNA
gctttatcttagaacataatgt

SEQ ID NO: 70383 - DNA, 22 bp, synthetic construct
  misc_feature 1..22: note = chemically synthesized
  source 1..22: mol_type = other DNA
ctttatcttagaacataatgta

SEQ ID NO: 70384 - DNA, 22 bp, synthetic construct
  misc_feature 1..22: note = chemically synthesized
  source 1..22: mol_type = other DNA
tatcttagaacataatgtaaaa

SEQ ID NO: 70385 - DNA, 22 bp, synthetic construct
  misc_feature 1..22: note = chemically synthesized
  source 1..22: mol_type = other DNA
atcttagaacataatgtaaaaa

SEQ ID NO: 70386 - DNA, 22 bp, synthetic construct
  misc_feature 1..22: note = chemically synthesized
  source 1..22: mol_type = other DNA
tcttagaacataatgtaaaaaa

SEQ ID NO: 70387 - DNA, 22 bp, synthetic construct
  misc_feature 1..22: note = chemically synthesized
  source 1..22: mol_type = other DNA
agaacataatgtaaaaaagatt

SEQ ID NO: 70388 - DNA, 22 bp, synthetic construct
  misc_feature 1..22: note = chemically synthesized
  source 1..22: mol_type = other DNA
gaacataatgtaaaaaagattt

SEQ ID NO: 70389 - DNA, 22 bp, synthetic construct
  misc_feature 1..22: note = chemically synthesized
  source 1..22: mol_type = other DNA
ttttaaaaaaaatcagctcttt

SEQ ID NO: 70390 - DNA, 22 bp, synthetic construct
  misc_feature 1..22: note = chemically synthesized
  source 1..22: mol_type = other DNA
tttaaaaaaaatcagctctttg

SEQ ID NO: 70391 - DNA, 22 bp, synthetic construct
  misc_feature 1..22: note = chemically synthesized
  source 1..22: mol_type = other DNA
ttaaaaaaaatcagctctttgg

SEQ ID NO: 70392 - DNA, 22 bp, synthetic construct
  misc_feature 1..22: note = chemically synthesized
  source 1..22: mol_type = other DNA
taaaaaaaatcagctctttggt

SEQ ID NO: 70393 - DNA, 22 bp, synthetic construct
  misc_feature 1..22: note = chemically synthesized
  source 1..22: mol_type = other DNA
aaaaaaaatcagctctttggtt

SEQ ID NO: 70394 - DNA, 22 bp, synthetic construct
  misc_feature 1..22: note = chemically synthesized
  source 1..22: mol_type = other DNA
aaaaaaatcagctctttggttt

SEQ ID NO: 70395 - DNA, 22 bp, synthetic construct
  misc_feature 1..22: note = chemically synthesized
  source 1..22: mol_type = other DNA
tttggtttccatgtaagagtct

SEQ ID NO: 70396 - DNA, 22 bp, synthetic construct
  misc_feature 1..22: note = chemically synthesized
  source 1..22: mol_type = other DNA
tggtttccatgtaagagtcttt

SEQ ID NO: 70397 - DNA, 22 bp, synthetic construct
  misc_feature 1..22: note = chemically synthesized
  source 1..22: mol_type = other DNA
ggtttccatgtaagagtctttt

SEQ ID NO: 70398 - DNA, 22 bp, synthetic construct
  misc_feature 1..22: note = chemically synthesized
  source 1..22: mol_type = other DNA
gtttccatgtaagagtcttttc

SEQ ID NO: 70399 - DNA, 22 bp, synthetic construct
  misc_feature 1..22: note = chemically synthesized
  source 1..22: mol_type = other DNA
ccatgtaagagtcttttctcat

SEQ ID NO: 70400 - DNA, 22 bp, synthetic construct
  misc_feature 1..22: note = chemically synthesized
  source 1..22: mol_type = other DNA
catgtaagagtcttttctcata

SEQ ID NO: 70401 - DNA, 22 bp, synthetic construct
  misc_feature 1..22: note = chemically synthesized
  source 1..22: mol_type = other DNA
ttctcataacaaaataacccca

SEQ ID NO: 70402 - DNA, 22 bp, synthetic construct
  misc_feature 1..22: note = chemically synthesized
  source 1..22: mol_type = other DNA
tctcataacaaaataaccccac

SEQ ID NO: 70403 - DNA, 22 bp, synthetic construct
  misc_feature 1..22: note = chemically synthesized
  source 1..22: mol_type = other DNA
ctcataacaaaataaccccact

SEQ ID NO: 70404 - DNA, 22 bp, synthetic construct
  misc_feature 1..22: note = chemically synthesized
  source 1..22: mol_type = other DNA
tcataacaaaataaccccactt

SEQ ID NO: 70405 - DNA, 22 bp, synthetic construct
  misc_feature 1..22: note = chemically synthesized
  source 1..22: mol_type = other DNA
ataacaaaataaccccactttt

SEQ ID NO: 70406 - DNA, 22 bp, synthetic construct
  misc_feature 1..22: note = chemically synthesized
  source 1..22: mol_type = other DNA
ttgaaatctaaaaatctggaaa

SEQ ID NO: 70407 - DNA, 22 bp, synthetic construct
  misc_feature 1..22: note = chemically synthesized
  source 1..22: mol_type = other DNA
tgaaatctaaaaatctggaaac

SEQ ID NO: 70408 - DNA, 22 bp, synthetic construct
  misc_feature 1..22: note = chemically synthesized
  source 1..22: mol_type = other DNA
gaaatctaaaaatctggaaaca

SEQ ID NO: 70409 - DNA, 22 bp, synthetic construct
  misc_feature 1..22: note = chemically synthesized
  source 1..22: mol_type = other DNA
aaatctaaaaatctggaaacaa

SEQ ID NO: 70410 - DNA, 22 bp, synthetic construct
  misc_feature 1..22: note = chemically synthesized
  source 1..22: mol_type = other DNA
aaaatctggaaacaaaggcatc

SEQ ID NO: 70411 - DNA, 22 bp, synthetic construct
  misc_feature 1..22: note = chemically synthesized
  source 1..22: mol_type = other DNA
gaaacaaaggcatcaggttttg

SEQ ID NO: 70412 - DNA, 22 bp, synthetic construct
  misc_feature 1..22: note = chemically synthesized
  source 1..22: mol_type = other DNA
tgttttgttttgttttgttttg

SEQ ID NO: 70413 - DNA, 22 bp, synthetic construct
  misc_feature 1..22: note = chemically synthesized
  source 1..22: mol_type = other DNA
gttttgttttgttttgttttgt

SEQ ID NO: 70414 - DNA, 22 bp, synthetic construct
  misc_feature 1..22: note = chemically synthesized
  source 1..22: mol_type = other DNA
ttttgttttgttttgttttgtt

SEQ ID NO: 70415 - DNA, 22 bp, synthetic construct
  misc_feature 1..22: note = chemically synthesized
  source 1..22: mol_type = other DNA
tgttttgttttgttttgtttaa

SEQ ID NO: 70416 - DNA, 22 bp, synthetic construct
  misc_feature 1..22: note = chemically synthesized
  source 1..22: mol_type = other DNA
gttttgttttgttttgtttaaa

SEQ ID NO: 70417 - DNA, 22 bp, synthetic construct
  misc_feature 1..22: note = chemically synthesized
  source 1..22: mol_type = other DNA
ttttgttttgttttgtttaaaa

SEQ ID NO: 70418 - DNA, 22 bp, synthetic construct
  misc_feature 1..22: note = chemically synthesized
  source 1..22: mol_type = other DNA
tgttttgttttgtttaaaaaag

SEQ ID NO: 70419 - DNA, 22 bp, synthetic construct
  misc_feature 1..22: note = chemically synthesized
  source 1..22: mol_type = other DNA
gttttgttttgtttaaaaaaga

SEQ ID NO: 70420 - DNA, 22 bp, synthetic construct
  misc_feature 1..22: note = chemically synthesized
  source 1..22: mol_type = other DNA
ttttgttttgtttaaaaaagag

SEQ ID NO: 70421 - DNA, 22 bp, synthetic construct
  misc_feature 1..22: note = chemically synthesized
  source 1..22: mol_type = other DNA
tgttttgtttaaaaaagaggga

SEQ ID NO: 70422 - DNA, 22 bp, synthetic construct
  misc_feature 1..22: note = chemically synthesized
  source 1..22: mol_type = other DNA
gttttgtttaaaaaagagggag

SEQ ID NO: 70423 - DNA, 22 bp, synthetic construct
  misc_feature 1..22: note = chemically synthesized
  source 1..22: mol_type = other DNA
ttttgtttaaaaaagagggaga

SEQ ID NO: 70424 - DNA, 22 bp, synthetic construct
  misc_feature 1..22: note = chemically synthesized
  source 1..22: mol_type = other DNA
tgtttaaaaaagagggagaaaa

SEQ ID NO: 70425 - DNA, 22 bp, synthetic construct
  misc_feature 1..22: note = chemically synthesized
  source 1..22: mol_type = other DNA
gtttaaaaaagagggagaaaaa

SEQ ID NO: 70426 - DNA, 22 bp, synthetic construct
  misc_feature 1..22: note = chemically synthesized
  source 1..22: mol_type = other DNA
tttaaaaaagagggagaaaaaa

SEQ ID NO: 70427 - DNA, 22 bp, synthetic construct
  misc_feature 1..22: note = chemically synthesized
  source 1..22: mol_type = other DNA
aaaaaagagggagaaaaaaaga

SEQ ID NO: 70428 - DNA, 22 bp, synthetic construct
  misc_feature 1..22: note = chemically synthesized
  source 1..22: mol_type = other DNA
aaaaagagggagaaaaaaagag

SEQ ID NO: 70429 - DNA, 22 bp, synthetic construct
  misc_feature 1..22: note = chemically synthesized
  source 1..22: mol_type = other DNA
ggggtgtagccagacatagtga

SEQ ID NO: 70430 - DNA, 22 bp, synthetic construct
  misc_feature 1..22: note = chemically synthesized
  source 1..22: mol_type = other DNA
tggaatcagccactgatttcct

SEQ ID NO: 70431 - DNA, 22 bp, synthetic construct
  misc_feature 1..22: note = chemically synthesized
  source 1..22: mol_type = other DNA
ggaatcagccactgatttcctg

SEQ ID NO: 70432 - DNA, 22 bp, synthetic construct
  misc_feature 1..22: note = chemically synthesized
  source 1..22: mol_type = other DNA
gaatcagccactgatttcctga

SEQ ID NO: 70433 - DNA, 22 bp, synthetic construct
  misc_feature 1..22: note = chemically synthesized
  source 1..22: mol_type = other DNA
atttcctgagatgcatagtggt

SEQ ID NO: 70434 - DNA, 22 bp, synthetic construct
  misc_feature 1..22: note = chemically synthesized
  source 1..22: mol_type = other DNA
cctgagatgcatagtggtttgc

SEQ ID NO: 70435 - DNA, 22 bp, synthetic construct
  misc_feature 1..22: note = chemically synthesized
  source 1..22: mol_type = other DNA
ctgagatgcatagtggtttgcc

SEQ ID NO: 70436 - DNA, 22 bp, synthetic construct
  misc_feature 1..22: note = chemically synthesized
  source 1..22: mol_type = other DNA
agatgcatagtggtttgccttg

SEQ ID NO: 70437 - DNA, 22 bp, synthetic construct
  misc_feature 1..22: note = chemically synthesized
  source 1..22: mol_type = other DNA
gccttgtggttctgagatccca

SEQ ID NO: 70438 - DNA, 22 bp, synthetic construct
  misc_feature 1..22: note = chemically synthesized
  source 1..22: mol_type = other DNA
ccttgtggttctgagatcccag

SEQ ID NO: 70439 - DNA, 22 bp, synthetic construct
  misc_feature 1..22: note = chemically synthesized
  source 1..22: mol_type = other DNA
gtggttctgagatcccaggaac

SEQ ID NO: 70440 - DNA, 22 bp, synthetic construct
  misc_feature 1..22: note = chemically synthesized
  source 1..22: mol_type = other DNA
tggttctgagatcccaggaacc

SEQ ID NO: 70441 - DNA, 22 bp, synthetic construct
  misc_feature 1..22: note = chemically synthesized
  source 1..22: mol_type = other DNA
tgagatcccaggaaccctagat

SEQ ID NO: 70442 - DNA, 22 bp, synthetic construct
  misc_feature 1..22: note = chemically synthesized
  source 1..22: mol_type = other DNA
agatcccaggaaccctagatgc

SEQ ID NO: 70443 - DNA, 22 bp, synthetic construct
  misc_feature 1..22: note = chemically synthesized
  source 1..22: mol_type = other DNA
gatgctacagattactttaggt

SEQ ID NO: 70444 - DNA, 22 bp, synthetic construct
  misc_feature 1..22: note = chemically synthesized
  source 1..22: mol_type = other DNA
cagattactttaggtgttttga

SEQ ID NO: 70445 - DNA, 22 bp, synthetic construct
  misc_feature 1..22: note = chemically synthesized
  source 1..22: mol_type = other DNA
ctttaggtgttttgatagggtc

SEQ ID NO: 70446 - DNA, 22 bp, synthetic construct
  misc_feature 1..22: note = chemically synthesized
  source 1..22: mol_type = other DNA
taggtgttttgatagggtcttc

SEQ ID NO: 70447 - DNA, 22 bp, synthetic construct
  misc_feature 1..22: note = chemically synthesized
  source 1..22: mol_type = other DNA
aggtgttttgatagggtcttcc

SEQ ID NO: 70448 - DNA, 22 bp, synthetic construct
  misc_feature 1..22: note = chemically synthesized
  source 1..22: mol_type = other DNA
ggtgttttgatagggtcttcct

SEQ ID NO: 70449 - DNA, 22 bp, synthetic construct
  misc_feature 1..22: note = chemically synthesized
  source 1..22: mol_type = other DNA
tgatagggtcttcctggatgac

SEQ ID NO: 70450 - DNA, 22 bp, synthetic construct
  misc_feature 1..22: note = chemically synthesized
  source 1..22: mol_type = other DNA
gatagggtcttcctggatgaca

SEQ ID NO: 70451 - DNA, 22 bp, synthetic construct
  misc_feature 1..22: note = chemically synthesized
  source 1..22: mol_type = other DNA
atagggtcttcctggatgacag

SEQ ID NO: 70452 - DNA, 22 bp, synthetic construct
  misc_feature 1..22: note = chemically synthesized
  source 1..22: mol_type = other DNA
cctggatgacagcaaataaggg

SEQ ID NO: 70453 - DNA, 22 bp, synthetic construct
  misc_feature 1..22: note = chemically synthesized
  source 1..22: mol_type = other DNA
ctggatgacagcaaataagggc

SEQ ID NO: 70454 - DNA, 22 bp, synthetic construct
  misc_feature 1..22: note = chemically synthesized
  source 1..22: mol_type = other DNA
gatgacagcaaataagggcggg

SEQ ID NO: 70455 - DNA, 22 bp, synthetic construct
  misc_feature 1..22: note = chemically synthesized
  source 1..22: mol_type = other DNA
caattatcttctgaccagccag

SEQ ID NO: 70456 - DNA, 22 bp, synthetic construct
  misc_feature 1..22: note = chemically synthesized
  source 1..22: mol_type = other DNA
aattatcttctgaccagccagt

SEQ ID NO: 70457 - DNA, 22 bp, synthetic construct
  misc_feature 1..22: note = chemically synthesized
  source 1..22: mol_type = other DNA
tcttctgaccagccagttaggt

SEQ ID NO: 70458 - DNA, 22 bp, synthetic construct
  misc_feature 1..22: note = chemically synthesized
  source 1..22: mol_type = other DNA
ctgaccagccagttaggtctat

SEQ ID NO: 70459 - DNA, 22 bp, synthetic construct
  misc_feature 1..22: note = chemically synthesized
  source 1..22: mol_type = other DNA
tgaccagccagttaggtctatt

SEQ ID NO: 70460 - DNA, 22 bp, synthetic construct
  misc_feature 1..22: note = chemically synthesized
  source 1..22: mol_type = other DNA
accagccagttaggtctatttt

SEQ ID NO: 70461 - DNA, 22 bp, synthetic construct
  misc_feature 1..22: note = chemically synthesized
  source 1..22: mol_type = other DNA
ggtctattttaaaaatccttag

SEQ ID NO: 70462 - DNA, 22 bp, synthetic construct
  misc_feature 1..22: note = chemically synthesized
  source 1..22: mol_type = other DNA
ttttaaaaatccttagaaatct

SEQ ID NO: 70463 - DNA, 22 bp, synthetic construct
  misc_feature 1..22: note = chemically synthesized
  source 1..22: mol_type = other DNA
taaaaatccttagaaatctgtg

SEQ ID NO: 70464 - DNA, 22 bp, synthetic construct
  misc_feature 1..22: note = chemically synthesized
  source 1..22: mol_type = other DNA
aaaaatccttagaaatctgtgt

SEQ ID NO: 70465 - DNA, 22 bp, synthetic construct
  misc_feature 1..22: note = chemically synthesized
  source 1..22: mol_type = other DNA
aaaatccttagaaatctgtgtt

SEQ ID NO: 70466 - DNA, 22 bp, synthetic construct
  misc_feature 1..22: note = chemically synthesized
  source 1..22: mol_type = other DNA
agaaatctgtgttgtcactttt

SEQ ID NO: 70467 - DNA, 22 bp, synthetic construct
  misc_feature 1..22: note = chemically synthesized
  source 1..22: mol_type = other DNA
gaaatctgtgttgtcactttta

SEQ ID NO: 70468 - DNA, 22 bp, synthetic construct
  misc_feature 1..22: note = chemically synthesized
  source 1..22: mol_type = other DNA
tgttgtcacttttacaaatact

SEQ ID NO: 70469 - DNA, 22 bp, synthetic construct
  misc_feature 1..22: note = chemically synthesized
  source 1..22: mol_type = other DNA
tcacttttacaaatactgcatg

SEQ ID NO: 70470 - DNA, 22 bp, synthetic construct
  misc_feature 1..22: note = chemically synthesized
  source 1..22: mol_type = other DNA
ttacaaatactgcatgttgcag

SEQ ID NO: 70471 - DNA, 22 bp, synthetic construct
  misc_feature 1..22: note = chemically synthesized
  source 1..22: mol_type = other DNA
tacaaatactgcatgttgcagc

SEQ ID NO: 70472 - DNA, 22 bp, synthetic construct
  misc_feature 1..22: note = chemically synthesized
  source 1..22: mol_type = other DNA
acaaatactgcatgttgcagca

SEQ ID NO: 70473 - DNA, 22 bp, synthetic construct
  misc_feature 1..22: note = chemically synthesized
  source 1..22: mol_type = other DNA
caaatactgcatgttgcagcat

SEQ ID NO: 70474 - DNA, 22 bp, synthetic construct
  misc_feature 1..22: note = chemically synthesized
  source 1..22: mol_type = other DNA
catgttgcagcatctatttgct

SEQ ID NO: 70475 - DNA, 22 bp, synthetic construct
  misc_feature 1..22: note = chemically synthesized
  source 1..22: mol_type = other DNA
cagcatctatttgctttactaa

SEQ ID NO: 70476 - DNA, 22 bp, synthetic construct
  misc_feature 1..22: note = chemically synthesized
  source 1..22: mol_type = other DNA
tttgctttactaaacacatacc

SEQ ID NO: 70477 - DNA, 22 bp, synthetic construct
  misc_feature 1..22: note = chemically synthesized
  source 1..22: mol_type = other DNA
gctttactaaacacatacctct

SEQ ID NO: 70478 - DNA, 22 bp, synthetic construct
  misc_feature 1..22: note = chemically synthesized
  source 1..22: mol_type = other DNA
ctttactaaacacatacctctg

SEQ ID NO: 70479 - DNA, 22 bp, synthetic construct
  misc_feature 1..22: note = chemically synthesized
  source 1..22: mol_type = other DNA
tactaaacacatacctctgtga

SEQ ID NO: 70480 - DNA, 22 bp, synthetic construct
  misc_feature 1..22: note = chemically synthesized
  source 1..22: mol_type = other DNA
actaaacacatacctctgtgat

SEQ ID NO: 70481 - DNA, 22 bp, synthetic construct
  misc_feature 1..22: note = chemically synthesized
  source 1..22: mol_type = other DNA
ctaaacacatacctctgtgata

SEQ ID NO: 70482 - DNA, 22 bp, synthetic construct
  misc_feature 1..22: note = chemically synthesized
  source 1..22: mol_type = other DNA
aacacatacctctgtgatatcg

SEQ ID NO: 70483 - DNA, 22 bp, synthetic construct
  misc_feature 1..22: note = chemically synthesized
  source 1..22: mol_type = other DNA
tgtgatatcgtgtccctgttcc

SEQ ID NO: 70484 - DNA, 22 bp, synthetic construct
  misc_feature 1..22: note = chemically synthesized
  source 1..22: mol_type = other DNA
tgatatcgtgtccctgttccca

SEQ ID NO: 70485 - DNA, 22 bp, synthetic construct
  misc_feature 1..22: note = chemically synthesized
  source 1..22: mol_type = other DNA
ttcccagtgtagatgaatgaat

SEQ ID NO: 70486 - DNA, 22 bp, synthetic construct
  misc_feature 1..22: note = chemically synthesized
  source 1..22: mol_type = other DNA
ccagtgtagatgaatgaatacg

SEQ ID NO: 70487 - DNA, 22 bp, synthetic construct
  misc_feature 1..22: note = chemically synthesized
  source 1..22: mol_type = other DNA
ttcttatttttgtaaaaaacca

SEQ ID NO: 70488 - DNA, 22 bp, synthetic construct
  misc_feature 1..22: note = chemically synthesized
  source 1..22: mol_type = other DNA
ttatttttgtaaaaaaccaaaa

SEQ ID NO: 70489 - DNA, 22 bp, synthetic construct
  misc_feature 1..22: note = chemically synthesized
  source 1..22: mol_type = other DNA
atttttgtaaaaaaccaaaaca

SEQ ID NO: 70490 - DNA, 22 bp, synthetic construct
  misc_feature 1..22: note = chemically synthesized
  source 1..22: mol_type = other DNA
tttttgtaaaaaaccaaaacaa

SEQ ID NO: 70491 - DNA, 22 bp, synthetic construct
  misc_feature 1..22: note = chemically synthesized
  source 1..22: mol_type = other DNA
ttgtaaaaaaccaaaacaaaag

SEQ ID NO: 70492 - DNA, 22 bp, synthetic construct
  misc_feature 1..22: note = chemically synthesized
  source 1..22: mol_type = other DNA
tgtaaaaaaccaaaacaaaagc

SEQ ID NO: 70493 - DNA, 22 bp, synthetic construct
  misc_feature 1..22: note = chemically synthesized
  source 1..22: mol_type = other DNA
gtaaaaaaccaaaacaaaagcc

SEQ ID NO: 70494 - DNA, 22 bp, synthetic construct
  misc_feature 1..22: note = chemically synthesized
  source 1..22: mol_type = other DNA
taaaaaaccaaaacaaaagccg

SEQ ID NO: 70495 - DNA, 22 bp, synthetic construct
  misc_feature 1..22: note = chemically synthesized
  source 1..22: mol_type = other DNA
tgttgtcttcttgtggtagcat

SEQ ID NO: 70496 - DNA, 22 bp, synthetic construct
  misc_feature 1..22: note = chemically synthesized
  source 1..22: mol_type = other DNA
ttgtcttcttgtggtagcattt

SEQ ID NO: 70497 - DNA, 22 bp, synthetic construct
  misc_feature 1..22: note = chemically synthesized
  source 1..22: mol_type = other DNA
tcttcttgtggtagcatttttt

SEQ ID NO: 70498 - DNA, 22 bp, synthetic construct
  misc_feature 1..22: note = chemically synthesized
  source 1..22: mol_type = other DNA
cttgtggtagcattttttgtcg

SEQ ID NO: 70499 - DNA, 22 bp, synthetic construct
  misc_feature 1..22: note = chemically synthesized
  source 1..22: mol_type = other DNA
ttgtggtagcattttttgtcgc

SEQ ID NO: 70500 - DNA, 22 bp, synthetic construct
  misc_feature 1..22: note = chemically synthesized
  source 1..22: mol_type = other DNA
gtggtagcattttttgtcgctc

SEQ ID NO: 70501 - DNA, 22 bp, synthetic construct
  misc_feature 1..22: note = chemically synthesized
  source 1..22: mol_type = other DNA
tggtagcattttttgtcgctca

SEQ ID NO: 70502 - DNA, 22 bp, synthetic construct
  misc_feature 1..22: note = chemically synthesized
  source 1..22: mol_type = other DNA
tttgtcgctcagttcttatgcc

SEQ ID NO: 70503 - DNA, 22 bp, synthetic construct
  misc_feature 1..22: note = chemically synthesized
  source 1..22: mol_type = other DNA
ttgtcgctcagttcttatgccc

SEQ ID NO: 70504 - DNA, 22 bp, synthetic construct
  misc_feature 1..22: note = chemically synthesized
  source 1..22: mol_type = other DNA
tgtcgctcagttcttatgccct

SEQ ID NO: 70505 - DNA, 22 bp, synthetic construct
  misc_feature 1..22: note = chemically synthesized
  source 1..22: mol_type = other DNA
gtcgctcagttcttatgcccta

SEQ ID NO: 70506 - DNA, 22 bp, synthetic construct
  misc_feature 1..22: note = chemically synthesized
  source 1..22: mol_type = other DNA
tcgctcagttcttatgccctag

SEQ ID NO: 70507 - DNA, 22 bp, synthetic construct
  misc_feature 1..22: note = chemically synthesized
  source 1..22: mol_type = other DNA
agttcttatgccctagtgcctg

SEQ ID NO: 70508 - DNA, 22 bp, synthetic construct
  misc_feature 1..22: note = chemically synthesized
  source 1..22: mol_type = other DNA
ttatgccctagtgcctgtgagg

SEQ ID NO: 70509 - DNA, 22 bp, synthetic construct
  misc_feature 1..22: note = chemically synthesized
  source 1..22: mol_type = other DNA
atgccctagtgcctgtgaggtg

SEQ ID NO: 70510 - DNA, 22 bp, synthetic construct
  misc_feature 1..22: note = chemically synthesized
  source 1..22: mol_type = other DNA
tgccctagtgcctgtgaggtgg

SEQ ID NO: 70511 - DNA, 22 bp, synthetic construct
  misc_feature 1..22: note = chemically synthesized
  source 1..22: mol_type = other DNA
gtgcctgtgaggtggccttttc

SEQ ID NO: 70512 - DNA, 22 bp, synthetic construct
  misc_feature 1..22: note = chemically synthesized
  source 1..22: mol_type = other DNA
tgaggtggccttttcatgtcat

SEQ ID NO: 70513 - DNA, 22 bp, synthetic construct
  misc_feature 1..22: note = chemically synthesized
  source 1..22: mol_type = other DNA
ttcatgtcatgccttttatctg

SEQ ID NO: 70514 - DNA, 22 bp, synthetic construct
  misc_feature 1..22: note = chemically synthesized
  source 1..22: mol_type = other DNA
tcatgtcatgccttttatctga

SEQ ID NO: 70515 - DNA, 22 bp, synthetic construct
  misc_feature 1..22: note = chemically synthesized
  source 1..22: mol_type = other DNA
catgtcatgccttttatctgag

SEQ ID NO: 70516 - DNA, 22 bp, synthetic construct
  misc_feature 1..22: note = chemically synthesized
  source 1..22: mol_type = other DNA
atgtcatgccttttatctgagg

SEQ ID NO: 70517 - DNA, 22 bp, synthetic construct
  misc_feature 1..22: note = chemically synthesized
  source 1..22: mol_type = other DNA
ttatctgaggcaagaatagttt

SEQ ID NO: 70518 - DNA, 22 bp, synthetic construct
  misc_feature 1..22: note = chemically synthesized
  source 1..22: mol_type = other DNA
tatctgaggcaagaatagtttt

SEQ ID NO: 70519 - DNA, 22 bp, synthetic construct
  misc_feature 1..22: note = chemically synthesized
  source 1..22: mol_type = other DNA
atctgaggcaagaatagtttta

SEQ ID NO: 70520 - DNA, 22 bp, synthetic construct
  misc_feature 1..22: note = chemically synthesized
  source 1..22: mol_type = other DNA
tctgaggcaagaatagttttat

SEQ ID NO: 70521 - DNA, 22 bp, synthetic construct
  misc_feature 1..22: note = chemically synthesized
  source 1..22: mol_type = other DNA
aggcaagaatagttttatcttt

SEQ ID NO: 70522 - DNA, 22 bp, synthetic construct
  misc_feature 1..22: note = chemically synthesized
  source 1..22: mol_type = other DNA
tatctttctaaagtataaagaa

SEQ ID NO: 70523 - DNA, 22 bp, synthetic construct
  misc_feature 1..22: note = chemically synthesized
  source 1..22: mol_type = other DNA
atctttctaaagtataaagaaa

SEQ ID NO: 70524 - DNA, 22 bp, synthetic construct
  misc_feature 1..22: note = chemically synthesized
  source 1..22: mol_type = other DNA
tctttctaaagtataaagaaag

SEQ ID NO: 70525 - DNA, 22 bp, synthetic construct
  misc_feature 1..22: note = chemically synthesized
  source 1..22: mol_type = other DNA
tctaaagtataaagaaagtcaa

SEQ ID NO: 70526 - DNA, 22 bp, synthetic construct
  misc_feature 1..22: note = chemically synthesized
  source 1..22: mol_type = other DNA
ctaaagtataaagaaagtcaat

SEQ ID NO: 70527 - DNA, 22 bp, synthetic construct
  misc_feature 1..22: note = chemically synthesized
  source 1..22: mol_type = other DNA
taaagtataaagaaagtcaatg

SEQ ID NO: 70528 - DNA, 22 bp, synthetic construct
  misc_feature 1..22: note = chemically synthesized
  source 1..22: mol_type = other DNA
aagtataaagaaagtcaatgtt

SEQ ID NO: 70529 - DNA, 22 bp, synthetic construct
  misc_feature 1..22: note = chemically synthesized
  source 1..22: mol_type = other DNA
tctgaaaagccagtttgggtgg

SEQ ID NO: 70530 - DNA, 22 bp, synthetic construct
  misc_feature 1..22: note = chemically synthesized
  source 1..22: mol_type = other DNA
ctgaaaagccagtttgggtggg

SEQ ID NO: 70531 - DNA, 22 bp, synthetic construct
  misc_feature 1..22: note = chemically synthesized
  source 1..22: mol_type = other DNA
tgaaaagccagtttgggtggga

SEQ ID NO: 70532 - DNA, 22 bp, synthetic construct
  misc_feature 1..22: note = chemically synthesized
  source 1..22: mol_type = other DNA
aaaagccagtttgggtgggaag

SEQ ID NO: 70533 - DNA, 22 bp, synthetic construct
  misc_feature 1..22: note = chemically synthesized
  source 1..22: mol_type = other DNA
gggtgggaaggagagagtgggg

SEQ ID NO: 70534 - DNA, 22 bp, synthetic construct
  misc_feature 1..22: note = chemically synthesized
  source 1..22: mol_type = other DNA
ggtgggaaggagagagtggggc

SEQ ID NO: 70535 - DNA, 22 bp, synthetic construct
  misc_feature 1..22: note = chemically synthesized
  source 1..22: mol_type = other DNA
gaggaatccactgagaaaggat

SEQ ID NO: 70536 - DNA, 22 bp, synthetic construct
  misc_feature 1..22: note = chemically synthesized
  source 1..22: mol_type = other DNA
agaaaggatgttggagaatatt

SEQ ID NO: 70537 - DNA, 22 bp, synthetic construct
  misc_feature 1..22: note = chemically synthesized
  source 1..22: mol_type = other DNA
gagaatattacataggaggtgg

SEQ ID NO: 70538 - DNA, 22 bp, synthetic construct
  misc_feature 1..22: note = chemically synthesized
  source 1..22: mol_type = other DNA
cataggaggtggggtggggtgg

SEQ ID NO: 70539 - DNA, 22 bp, synthetic construct
  misc_feature 1..22: note = chemically synthesized
  source 1..22: mol_type = other DNA
gagaacttgatgtttgtcactg

SEQ ID NO: 70540 - DNA, 22 bp, synthetic construct
  misc_feature 1..22: note = chemically synthesized
  source 1..22: mol_type = other DNA
agaacttgatgtttgtcactga

SEQ ID NO: 70541 - DNA, 22 bp, synthetic construct
  misc_feature 1..22: note = chemically synthesized
  source 1..22: mol_type = other DNA
gatgtttgtcactgaacttaga

SEQ ID NO: 70542 - DNA, 22 bp, synthetic construct
  misc_feature 1..22: note = chemically synthesized
  source 1..22: mol_type = other DNA
atgtttgtcactgaacttagaa

SEQ ID NO: 70543 - DNA, 22 bp, synthetic construct
  misc_feature 1..22: note = chemically synthesized
  source 1..22: mol_type = other DNA
gtcactgaacttagaaaagata

SEQ ID NO: 70544 - DNA, 22 bp, synthetic construct
  misc_feature 1..22: note = chemically synthesized
  source 1..22: mol_type = other DNA
tcactgaacttagaaaagatat

SEQ ID NO: 70545 - DNA, 22 bp, synthetic construct
  misc_feature 1..22: note = chemically synthesized
  source 1..22: mol_type = other DNA
aacttagaaaagatatactgta

SEQ ID NO: 70546 - DNA, 22 bp, synthetic construct
  misc_feature 1..22: note = chemically synthesized
  source 1..22: mol_type = other DNA
agaaaagatatactgtatgtgt

SEQ ID NO: 70547 - DNA, 22 bp, synthetic construct
  misc_feature 1..22: note = chemically synthesized
  source 1..22: mol_type = other DNA
gaaaagatatactgtatgtgtt

SEQ ID NO: 70548 - DNA, 22 bp, synthetic construct
  misc_feature 1..22: note = chemically synthesized
  source 1..22: mol_type = other DNA
tatgtgttttggattaggtttc

SEQ ID NO: 70549 - DNA, 22 bp, synthetic construct
  misc_feature 1..22: note = chemically synthesized
  source 1..22: mol_type = other DNA
tggattaggtttctccaaaact

SEQ ID NO: 70550 - DNA, 22 bp, synthetic construct
  misc_feature 1..22: note = chemically synthesized
  source 1..22: mol_type = other DNA
ggattaggtttctccaaaactg

SEQ ID NO: 70551 - DNA, 22 bp, synthetic construct
  misc_feature 1..22: note = chemically synthesized
  source 1..22: mol_type = other DNA
gattaggtttctccaaaactga

SEQ ID NO: 70552 - DNA, 22 bp, synthetic construct
  misc_feature 1..22: note = chemically synthesized
  source 1..22: mol_type = other DNA
ggtttctccaaaactgaatcca

SEQ ID NO: 70553 - DNA, 22 bp, synthetic construct
  misc_feature 1..22: note = chemically synthesized
  source 1..22: mol_type = other DNA
ctccaaaactgaatccaaaatg

SEQ ID NO: 70554 - DNA, 22 bp, synthetic construct
  misc_feature 1..22: note = chemically synthesized
  source 1..22: mol_type = other DNA
tccaaaactgaatccaaaatgc

SEQ ID NO: 70555 - DNA, 22 bp, synthetic construct
  misc_feature 1..22: note = chemically synthesized
  source 1..22: mol_type = other DNA
caaaactgaatccaaaatgctg

SEQ ID NO: 70556 - DNA, 22 bp, synthetic construct
  misc_feature 1..22: note = chemically synthesized
  source 1..22: mol_type = other DNA
aatccaaaatgctgctcaagac

SEQ ID NO: 70557 - DNA, 22 bp, synthetic construct
  misc_feature 1..22: note = chemically synthesized
  source 1..22: mol_type = other DNA
ctcaagacagatagaaataatt

SEQ ID NO: 70558 - DNA, 22 bp, synthetic construct
  misc_feature 1..22: note = chemically synthesized
  source 1..22: mol_type = other DNA
aagacagatagaaataattccc

SEQ ID NO: 70559 - DNA, 22 bp, synthetic construct
  misc_feature 1..22: note = chemically synthesized
  source 1..22: mol_type = other DNA
cccagtgccatgccagctttag

SEQ ID NO: 70560 - DNA, 22 bp, synthetic construct
  misc_feature 1..22: note = chemically synthesized
  source 1..22: mol_type = other DNA
tagatgtggtgacttcgactcc

SEQ ID NO: 70561 - DNA, 22 bp, synthetic construct
  misc_feature 1..22: note = chemically synthesized
  source 1..22: mol_type = other DNA
agatgtggtgacttcgactcca

SEQ ID NO: 70562 - DNA, 22 bp, synthetic construct
  misc_feature 1..22: note = chemically synthesized
  source 1..22: mol_type = other DNA
gatgtggtgacttcgactccac

SEQ ID NO: 70563 - DNA, 22 bp, synthetic construct
  misc_feature 1..22: note = chemically synthesized
  source 1..22: mol_type = other DNA
cgactccaccctattaaatgtc

SEQ ID NO: 70564 - DNA, 22 bp, synthetic construct
  misc_feature 1..22: note = chemically synthesized
  source 1..22: mol_type = other DNA
gactccaccctattaaatgtcc

SEQ ID NO: 70565 - DNA, 22 bp, synthetic construct
  misc_feature 1..22: note = chemically synthesized
  source 1..22: mol_type = other DNA
caccctattaaatgtccataaa

SEQ ID NO: 70566 - DNA, 22 bp, synthetic construct
  misc_feature 1..22: note = chemically synthesized
  source 1..22: mol_type = other DNA
ttaaatgtccataaaacctctg

SEQ ID NO: 70567 - DNA, 22 bp, synthetic construct
  misc_feature 1..22: note = chemically synthesized
  source 1..22: mol_type = other DNA
aatgtccataaaacctctgtgt

SEQ ID NO: 70568 - DNA, 22 bp, synthetic construct
  misc_feature 1..22: note = chemically synthesized
  source 1..22: mol_type = other DNA
tgtgtgtccctattactctttt

SEQ ID NO: 70569 - DNA, 22 bp, synthetic construct
  misc_feature 1..22: note = chemically synthesized
  source 1..22: mol_type = other DNA
tgtgtccctattactcttttat

SEQ ID NO: 70570 - DNA, 22 bp, synthetic construct
  misc_feature 1..22: note = chemically synthesized
  source 1..22: mol_type = other DNA
ttactcttttattaggagctat

SEQ ID NO: 70571 - DNA, 22 bp, synthetic construct
  misc_feature 1..22: note = chemically synthesized
  source 1..22: mol_type = other DNA
ctcttttattaggagctatgag

SEQ ID NO: 70572 - DNA, 22 bp, synthetic construct
  misc_feature 1..22: note = chemically synthesized
  source 1..22: mol_type = other DNA
ttttattaggagctatgagtgc

SEQ ID NO: 70573 - DNA, 22 bp, synthetic construct
  misc_feature 1..22: note = chemically synthesized
  source 1..22: mol_type = other DNA
ttattaggagctatgagtgcaa

SEQ ID NO: 70574 - DNA, 22 bp, synthetic construct
  misc_feature 1..22: note = chemically synthesized
  source 1..22: mol_type = other DNA
tattaggagctatgagtgcaac

SEQ ID NO: 70575 - DNA, 22 bp, synthetic construct
  misc_feature 1..22: note = chemically synthesized
  source 1..22: mol_type = other DNA
attaggagctatgagtgcaact

SEQ ID NO: 70576 - DNA, 22 bp, synthetic construct
  misc_feature 1..22: note = chemically synthesized
  source 1..22: mol_type = other DNA
ttaggagctatgagtgcaactg

SEQ ID NO: 70577 - DNA, 22 bp, synthetic construct
  misc_feature 1..22: note = chemically synthesized
  source 1..22: mol_type = other DNA
ggagctatgagtgcaactgtgt

SEQ ID NO: 70578 - DNA, 22 bp, synthetic construct
  misc_feature 1..22: note = chemically synthesized
  source 1..22: mol_type = other DNA
tgagtgcaactgtgtaggtttt

SEQ ID NO: 70579 - DNA, 22 bp, synthetic construct
  misc_feature 1..22: note = chemically synthesized
  source 1..22: mol_type = other DNA
tgtaggttttatatacagtatt

SEQ ID NO: 70580 - DNA, 22 bp, synthetic construct
  misc_feature 1..22: note = chemically synthesized
  source 1..22: mol_type = other DNA
tatatacagtattcattttaat

SEQ ID NO: 70581 - DNA, 22 bp, synthetic construct
  misc_feature 1..22: note = chemically synthesized
  source 1..22: mol_type = other DNA
atatacagtattcattttaatt

SEQ ID NO: 70582 - DNA, 22 bp, synthetic construct
  misc_feature 1..22: note = chemically synthesized
  source 1..22: mol_type = other DNA
tatacagtattcattttaattt

SEQ ID NO: 70583 - DNA, 22 bp, synthetic construct
  misc_feature 1..22: note = chemically synthesized
  source 1..22: mol_type = other DNA
attttaatttctcagtatatgc

SEQ ID NO: 70584 - DNA, 22 bp, synthetic construct
  misc_feature 1..22: note = chemically synthesized
  source 1..22: mol_type = other DNA
taatttctcagtatatgctgct

SEQ ID NO: 70585 - DNA, 22 bp, synthetic construct
  misc_feature 1..22: note = chemically synthesized
  source 1..22: mol_type = other DNA
aatttctcagtatatgctgctc

SEQ ID NO: 70586 - DNA, 22 bp, synthetic construct
  misc_feature 1..22: note = chemically synthesized
  source 1..22: mol_type = other DNA
atttctcagtatatgctgctct

SEQ ID NO: 70587 - DNA, 22 bp, synthetic construct
  misc_feature 1..22: note = chemically synthesized
  source 1..22: mol_type = other DNA
ctcagtatatgctgctcttagc

SEQ ID NO: 70588 - DNA, 22 bp, synthetic construct
  misc_feature 1..22: note = chemically synthesized
  source 1..22: mol_type = other DNA
tcagtatatgctgctcttagcg

SEQ ID NO: 70589 - DNA, 22 bp, synthetic construct
  misc_feature 1..22: note = chemically synthesized
  source 1..22: mol_type = other DNA
agtatatgctgctcttagcgta

SEQ ID NO: 70590 - DNA, 22 bp, synthetic construct
  misc_feature 1..22: note = chemically synthesized
  source 1..22: mol_type = other DNA
ctcttagcgtaattaggttttg

SEQ ID NO: 70591 - DNA, 22 bp, synthetic construct
  misc_feature 1..22: note = chemically synthesized
  source 1..22: mol_type = other DNA
ttagcgtaattaggttttgcat

SEQ ID NO: 70592 - DNA, 22 bp, synthetic construct
  misc_feature 1..22: note = chemically synthesized
  source 1..22: mol_type = other DNA
agcgtaattaggttttgcatcc

SEQ ID NO: 70593 - DNA, 22 bp, synthetic construct
  misc_feature 1..22: note = chemically synthesized
  source 1..22: mol_type = other DNA
gcgtaattaggttttgcatcct

SEQ ID NO: 70594 - DNA, 22 bp, synthetic construct
  misc_feature 1..22: note = chemically synthesized
  source 1..22: mol_type = other DNA
ggttttgcatcctgacagacag

SEQ ID NO: 70595 - DNA, 22 bp, synthetic construct
  misc_feature 1..22: note = chemically synthesized
  source 1..22: mol_type = other DNA
tgcatcctgacagacagaatta

SEQ ID NO: 70596 - DNA, 22 bp, synthetic construct
  misc_feature 1..22: note = chemically synthesized
  source 1..22: mol_type = other DNA
gcatcctgacagacagaattaa

SEQ ID NO: 70597 - DNA, 22 bp, synthetic construct
  misc_feature 1..22: note = chemically synthesized
  source 1..22: mol_type = other DNA
catcctgacagacagaattaat

SEQ ID NO: 70598 - DNA, 22 bp, synthetic construct
  misc_feature 1..22: note = chemically synthesized
  source 1..22: mol_type = other DNA
acagacagaattaatggtggat

SEQ ID NO: 70599 - DNA, 22 bp, synthetic construct
  misc_feature 1..22: note = chemically synthesized
  source 1..22: mol_type = other DNA
atggtggatactgtacacttgt

SEQ ID NO: 70600 - DNA, 22 bp, synthetic construct
  misc_feature 1..22: note = chemically synthesized
  source 1..22: mol_type = other DNA
tacacttgtctgttcaaatttc

SEQ ID NO: 70601 - DNA, 22 bp, synthetic construct
  misc_feature 1..22: note = chemically synthesized
  source 1..22: mol_type = other DNA
gtctgttcaaatttcttaaatc

SEQ ID NO: 70602 - DNA, 22 bp, synthetic construct
  misc_feature 1..22: note = chemically synthesized
  source 1..22: mol_type = other DNA
tctgttcaaatttcttaaatca

SEQ ID NO: 70603 - DNA, 22 bp, synthetic construct
  misc_feature 1..22: note = chemically synthesized
  source 1..22: mol_type = other DNA
ttcaaatttcttaaatcaaatg

SEQ ID NO: 70604 - DNA, 22 bp, synthetic construct
  misc_feature 1..22: note = chemically synthesized
  source 1..22: mol_type = other DNA
aaatttcttaaatcaaatgggg

SEQ ID NO: 70605 - DNA, 22 bp, synthetic construct
  misc_feature 1..22: note = chemically synthesized
  source 1..22: mol_type = other DNA
cttaaatcaaatggggaatggg

SEQ ID NO: 70606 - DNA, 22 bp, synthetic construct
  misc_feature 1..22: note = chemically synthesized
  source 1..22: mol_type = other DNA
ttaaatcaaatggggaatgggg

SEQ ID NO: 70607 - DNA, 22 bp, synthetic construct
  misc_feature 1..22: note = chemically synthesized
  source 1..22: mol_type = other DNA
aaatcaaatggggaatggggag

SEQ ID NO: 70608 - DNA, 22 bp, synthetic construct
  misc_feature 1..22: note = chemically synthesized
  source 1..22: mol_type = other DNA
aatcaaatggggaatggggagg

SEQ ID NO: 70609 - DNA, 22 bp, synthetic construct
  misc_feature 1..22: note = chemically synthesized
  source 1..22: mol_type = other DNA
gtgataaatcacagattatgtt

SEQ ID NO: 70610 - DNA, 22 bp, synthetic construct
  misc_feature 1..22: note = chemically synthesized
  source 1..22: mol_type = other DNA
tgtttgatttacatggtcccaa

SEQ ID NO: 70611 - DNA, 22 bp, synthetic construct
  misc_feature 1..22: note = chemically synthesized
  source 1..22: mol_type = other DNA
gatttacatggtcccaaagtta

SEQ ID NO: 70612 - DNA, 22 bp, synthetic construct
  misc_feature 1..22: note = chemically synthesized
  source 1..22: mol_type = other DNA
atttacatggtcccaaagttaa

SEQ ID NO: 70613 - DNA, 22 bp, synthetic construct
  misc_feature 1..22: note = chemically synthesized
  source 1..22: mol_type = other DNA
acatggtcccaaagttaaataa

SEQ ID NO: 70614 - DNA, 22 bp, synthetic construct
  misc_feature 1..22: note = chemically synthesized
  source 1..22: mol_type = other DNA
catggtcccaaagttaaataaa

SEQ ID NO: 70615 - DNA, 22 bp, synthetic construct
  misc_feature 1..22: note = chemically synthesized
  source 1..22: mol_type = other DNA
aataaatttactgggagatggg

SEQ ID NO: 70616 - DNA, 22 bp, synthetic construct
  misc_feature 1..22: note = chemically synthesized
  source 1..22: mol_type = other DNA
actgggagatgggttcttcagg

SEQ ID NO: 70617 - DNA, 22 bp, synthetic construct
  misc_feature 1..22: note = chemically synthesized
  source 1..22: mol_type = other DNA
ctgggagatgggttcttcaggt

SEQ ID NO: 70618 - DNA, 22 bp, synthetic construct
  misc_feature 1..22: note = chemically synthesized
  source 1..22: mol_type = other DNA
ggagatgggttcttcaggttac

SEQ ID NO: 70619 - DNA, 22 bp, synthetic construct
  misc_feature 1..22: note = chemically synthesized
  source 1..22: mol_type = other DNA
ttcaggttacttagtctcctga

SEQ ID NO: 70620 - DNA, 22 bp, synthetic construct
  misc_feature 1..22: note = chemically synthesized
  source 1..22: mol_type = other DNA
caggttacttagtctcctgact

SEQ ID NO: 70621 - DNA, 22 bp, synthetic construct
  misc_feature 1..22: note = chemically synthesized
  source 1..22: mol_type = other DNA
aggttacttagtctcctgactt

SEQ ID NO: 70622 - DNA, 22 bp, synthetic construct
  misc_feature 1..22: note = chemically synthesized
  source 1..22: mol_type = other DNA
cttagtctcctgacttattgac

SEQ ID NO: 70623 - DNA, 22 bp, synthetic construct
  misc_feature 1..22: note = chemically synthesized
  source 1..22: mol_type = other DNA
agtctcctgacttattgacgcc

SEQ ID NO: 70624 - DNA, 22 bp, synthetic construct
  misc_feature 1..22: note = chemically synthesized
  source 1..22: mol_type = other DNA
gtctcctgacttattgacgcct

SEQ ID NO: 70625 - DNA, 22 bp, synthetic construct
  misc_feature 1..22: note = chemically synthesized
  source 1..22: mol_type = other DNA
ctgacttattgacgccttctga

SEQ ID NO: 70626 - DNA, 22 bp, synthetic construct
  misc_feature 1..22: note = chemically synthesized
  source 1..22: mol_type = other DNA
acttattgacgccttctgataa

SEQ ID NO: 70627 - DNA, 22 bp, synthetic construct
  misc_feature 1..22: note = chemically synthesized
  source 1..22: mol_type = other DNA
attgacgccttctgataaaata

SEQ ID NO: 70628 - DNA, 22 bp, synthetic construct
  misc_feature 1..22: note = chemically synthesized
  source 1..22: mol_type = other DNA
ttgacgccttctgataaaatat

SEQ ID NO: 70629 - DNA, 22 bp, synthetic construct
  misc_feature 1..22: note = chemically synthesized
  source 1..22: mol_type = other DNA
acgccttctgataaaatattat

SEQ ID NO: 70630 - DNA, 22 bp, synthetic construct
  misc_feature 1..22: note = chemically synthesized
  source 1..22: mol_type = other DNA
ctgataaaatattatttctgaa

SEQ ID NO: 70631 - DNA, 22 bp, synthetic construct
  misc_feature 1..22: note = chemically synthesized
  source 1..22: mol_type = other DNA
tgataaaatattatttctgaag

SEQ ID NO: 70632 - DNA, 22 bp, synthetic construct
  misc_feature 1..22: note = chemically synthesized
  source 1..22: mol_type = other DNA
ataaaatattatttctgaagct

SEQ ID NO: 70633 - DNA, 22 bp, synthetic construct
  misc_feature 1..22: note = chemically synthesized
  source 1..22: mol_type = other DNA
tttctgaagctgatgaacaata

SEQ ID NO: 70634 - DNA, 22 bp, synthetic construct
  misc_feature 1..22: note = chemically synthesized
  source 1..22: mol_type = other DNA
ctgaagctgatgaacaatagaa

SEQ ID NO: 70635 - DNA, 22 bp, synthetic construct
  misc_feature 1..22: note = chemically synthesized
  source 1..22: mol_type = other DNA
tgaagctgatgaacaatagaaa

SEQ ID NO: 70636 - DNA, 22 bp, synthetic construct
  misc_feature 1..22: note = chemically synthesized
  source 1..22: mol_type = other DNA
aagctgatgaacaatagaaaca

SEQ ID NO: 70637 - DNA, 22 bp, synthetic construct
  misc_feature 1..22: note = chemically synthesized
  source 1..22: mol_type = other DNA
atgaacaatagaaacatgagaa

SEQ ID NO: 70638 - DNA, 22 bp, synthetic construct
  misc_feature 1..22: note = chemically synthesized
  source 1..22: mol_type = other DNA
gccaacatgatatcacttataa

SEQ ID NO: 70639 - DNA, 22 bp, synthetic construct
  misc_feature 1..22: note = chemically synthesized
  source 1..22: mol_type = other DNA
ataaatgatattttgtatccag

SEQ ID NO: 70640 - DNA, 22 bp, synthetic construct
  misc_feature 1..22: note = chemically synthesized
  source 1..22: mol_type = other DNA
taaatgatattttgtatccaga

SEQ ID NO: 70641 - DNA, 22 bp, synthetic construct
  misc_feature 1..22: note = chemically synthesized
  source 1..22: mol_type = other DNA
tgtatccagaactctaaaattt

SEQ ID NO: 70642 - DNA, 22 bp, synthetic construct
  misc_feature 1..22: note = chemically synthesized
  source 1..22: mol_type = other DNA
gtatccagaactctaaaattta

SEQ ID NO: 70643 - DNA, 22 bp, synthetic construct
  misc_feature 1..22: note = chemically synthesized
  source 1..22: mol_type = other DNA
tatccagaactctaaaatttaa

SEQ ID NO: 70644 - DNA, 22 bp, synthetic construct
  misc_feature 1..22: note = chemically synthesized
  source 1..22: mol_type = other DNA
taaaatttaaaatcttaatata

SEQ ID NO: 70645 - DNA, 22 bp, synthetic construct
  misc_feature 1..22: note = chemically synthesized
  source 1..22: mol_type = other DNA
aaatttaaaatcttaatataaa

SEQ ID NO: 70646 - DNA, 22 bp, synthetic construct
  misc_feature 1..22: note = chemically synthesized
  source 1..22: mol_type = other DNA
aaaatcttaatataaaataaca

SEQ ID NO: 70647 - DNA, 22 bp, synthetic construct
  misc_feature 1..22: note = chemically synthesized
  source 1..22: mol_type = other DNA
aaatcttaatataaaataacat

SEQ ID NO: 70648 - DNA, 22 bp, synthetic construct
  misc_feature 1..22: note = chemically synthesized
  source 1..22: mol_type = other DNA
aatataaaataacatgcacatt

SEQ ID NO: 70649 - DNA, 22 bp, synthetic construct
  misc_feature 1..22: note = chemically synthesized
  source 1..22: mol_type = other DNA
atataaaataacatgcacattt

SEQ ID NO: 70650 - DNA, 22 bp, synthetic construct
  misc_feature 1..22: note = chemically synthesized
  source 1..22: mol_type = other DNA
ccaatagtaagatgaattcatg

SEQ ID NO: 70651 - DNA, 22 bp, synthetic construct
  misc_feature 1..22: note = chemically synthesized
  source 1..22: mol_type = other DNA
caatagtaagatgaattcatga

SEQ ID NO: 70652 - DNA, 22 bp, synthetic construct
  misc_feature 1..22: note = chemically synthesized
  source 1..22: mol_type = other DNA
atgatcttttttttttaaatga

SEQ ID NO: 70653 - DNA, 22 bp, synthetic construct
  misc_feature 1..22: note = chemically synthesized
  source 1..22: mol_type = other DNA
ttttttttaaatgaggaactac

SEQ ID NO: 70654 - DNA, 22 bp, synthetic construct
  misc_feature 1..22: note = chemically synthesized
  source 1..22: mol_type = other DNA
tttttttaaatgaggaactact

SEQ ID NO: 70655 - DNA, 22 bp, synthetic construct
  misc_feature 1..22: note = chemically synthesized
  source 1..22: mol_type = other DNA
ttttttaaatgaggaactacta

SEQ ID NO: 70656 - DNA, 22 bp, synthetic construct
  misc_feature 1..22: note = chemically synthesized
  source 1..22: mol_type = other DNA
tttttaaatgaggaactactaa

SEQ ID NO: 70657 - DNA, 22 bp, synthetic construct
  misc_feature 1..22: note = chemically synthesized
  source 1..22: mol_type = other DNA
ttttaaatgaggaactactaag

SEQ ID NO: 70658 - DNA, 22 bp, synthetic construct
  misc_feature 1..22: note = chemically synthesized
  source 1..22: mol_type = other DNA
tttaaatgaggaactactaaga

SEQ ID NO: 70659 - DNA, 22 bp, synthetic construct
  misc_feature 1..22: note = chemically synthesized
  source 1..22: mol_type = other DNA
ttaaatgaggaactactaagaa

SEQ ID NO: 70660 - DNA, 22 bp, synthetic construct
  misc_feature 1..22: note = chemically synthesized
  source 1..22: mol_type = other DNA
taaatgaggaactactaagaac

SEQ ID NO: 70661 - DNA, 22 bp, synthetic construct
  misc_feature 1..22: note = chemically synthesized
  source 1..22: mol_type = other DNA
aaatgaggaactactaagaaca

SEQ ID NO: 70662 - DNA, 22 bp, synthetic construct
  misc_feature 1..22: note = chemically synthesized
  source 1..22: mol_type = other DNA
aatgaggaactactaagaacat

SEQ ID NO: 70663 - DNA, 22 bp, synthetic construct
  misc_feature 1..22: note = chemically synthesized
  source 1..22: mol_type = other DNA
ctaagaacattaatgtctctta

SEQ ID NO: 70664 - DNA, 22 bp, synthetic construct
  misc_feature 1..22: note = chemically synthesized
  source 1..22: mol_type = other DNA
agaacattaatgtctcttaaaa

SEQ ID NO: 70665 - DNA, 22 bp, synthetic construct
  misc_feature 1..22: note = chemically synthesized
  source 1..22: mol_type = other DNA
atgtctcttaaaatcctcaagt

SEQ ID NO: 70666 - DNA, 22 bp, synthetic construct
  misc_feature 1..22: note = chemically synthesized
  source 1..22: mol_type = other DNA
ttaaaatcctcaagtaagtttt

SEQ ID NO: 70667 - DNA, 22 bp, synthetic construct
  misc_feature 1..22: note = chemically synthesized
  source 1..22: mol_type = other DNA
aaaatcctcaagtaagtttttg

SEQ ID NO: 70668 - DNA, 22 bp, synthetic construct
  misc_feature 1..22: note = chemically synthesized
  source 1..22: mol_type = other DNA
aaatcctcaagtaagtttttgt

SEQ ID NO: 70669 - DNA, 22 bp, synthetic construct
  misc_feature 1..22: note = chemically synthesized
  source 1..22: mol_type = other DNA
aagtaagtttttgtaacaggct

SEQ ID NO: 70670 - DNA, 22 bp, synthetic construct
  misc_feature 1..22: note = chemically synthesized
  source 1..22: mol_type = other DNA
ttgtaacaggcttgacgtgctg

SEQ ID NO: 70671 - DNA, 22 bp, synthetic construct
  misc_feature 1..22: note = chemically synthesized
  source 1..22: mol_type = other DNA
tgtaacaggcttgacgtgctga

SEQ ID NO: 70672 - DNA, 22 bp, synthetic construct
  misc_feature 1..22: note = chemically synthesized
  source 1..22: mol_type = other DNA
gtaacaggcttgacgtgctgat

SEQ ID NO: 70673 - DNA, 22 bp, synthetic construct
  misc_feature 1..22: note = chemically synthesized
  source 1..22: mol_type = other DNA
taacaggcttgacgtgctgatg

SEQ ID NO: 70674 - DNA, 22 bp, synthetic construct
  misc_feature 1..22: note = chemically synthesized
  source 1..22: mol_type = other DNA
gacgtgctgatggaatgttctc

SEQ ID NO: 70675 - DNA, 22 bp, synthetic construct
  misc_feature 1..22: note = chemically synthesized
  source 1..22: mol_type = other DNA
acgtgctgatggaatgttctct

SEQ ID NO: 70676 - DNA, 22 bp, synthetic construct
  misc_feature 1..22: note = chemically synthesized
  source 1..22: mol_type = other DNA
atggaatgttctctacatacct

SEQ ID NO: 70677 - DNA, 22 bp, synthetic construct
  misc_feature 1..22: note = chemically synthesized
  source 1..22: mol_type = other DNA
tctacatacctgaactgatgct

SEQ ID NO: 70678 - DNA, 22 bp, synthetic construct
  misc_feature 1..22: note = chemically synthesized
  source 1..22: mol_type = other DNA
tacatacctgaactgatgctta

SEQ ID NO: 70679 - DNA, 22 bp, synthetic construct
  misc_feature 1..22: note = chemically synthesized
  source 1..22: mol_type = other DNA
catacctgaactgatgcttaaa

SEQ ID NO: 70680 - DNA, 22 bp, synthetic construct
  misc_feature 1..22: note = chemically synthesized
  source 1..22: mol_type = other DNA
aactgatgcttaaaatgttctt

SEQ ID NO: 70681 - DNA, 22 bp, synthetic construct
  misc_feature 1..22: note = chemically synthesized
  source 1..22: mol_type = other DNA
atgcttaaaatgttctttttaa

SEQ ID NO: 70682 - DNA, 22 bp, synthetic construct
  misc_feature 1..22: note = chemically synthesized
  source 1..22: mol_type = other DNA
aaaatgttctttttaatcttca

SEQ ID NO: 70683 - DNA, 22 bp, synthetic construct
  misc_feature 1..22: note = chemically synthesized
  source 1..22: mol_type = other DNA
aaatgttctttttaatcttcat

SEQ ID NO: 70684 - DNA, 22 bp, synthetic construct
  misc_feature 1..22: note = chemically synthesized
  source 1..22: mol_type = other DNA
tttttaatcttcatttgagaac

SEQ ID NO: 70685 - DNA, 22 bp, synthetic construct
  misc_feature 1..22: note = chemically synthesized
  source 1..22: mol_type = other DNA
tttaatcttcatttgagaacaa

SEQ ID NO: 70686 - DNA, 22 bp, synthetic construct
  misc_feature 1..22: note = chemically synthesized
  source 1..22: mol_type = other DNA
ttaatcttcatttgagaacaac

SEQ ID NO: 70687 - DNA, 22 bp, synthetic construct
  misc_feature 1..22: note = chemically synthesized
  source 1..22: mol_type = other DNA
taatcttcatttgagaacaact

SEQ ID NO: 70688 - DNA, 22 bp, synthetic construct
  misc_feature 1..22: note = chemically synthesized
  source 1..22: mol_type = other DNA
aatcttcatttgagaacaactt

SEQ ID NO: 70689 - DNA, 22 bp, synthetic construct
  misc_feature 1..22: note = chemically synthesized
  source 1..22: mol_type = other DNA
atcttcatttgagaacaactta

SEQ ID NO: 70690 - DNA, 22 bp, synthetic construct
  misc_feature 1..22: note = chemically synthesized
  source 1..22: mol_type = other DNA
catttgagaacaacttaataaa

SEQ ID NO: 70691 - DNA, 22 bp, synthetic construct
  misc_feature 1..22: note = chemically synthesized
  source 1..22: mol_type = other DNA
atttgagaacaacttaataaac

SEQ ID NO: 70692 - DNA, 22 bp, synthetic construct
  misc_feature 1..22: note = chemically synthesized
  source 1..22: mol_type = other DNA
gagaacaacttaataaacagga

SEQ ID NO: 70693 - DNA, 22 bp, synthetic construct
  misc_feature 1..22: note = chemically synthesized
  source 1..22: mol_type = other DNA
agaacaacttaataaacaggaa

SEQ ID NO: 70694 - DNA, 22 bp, synthetic construct
  misc_feature 1..22: note = chemically synthesized
  source 1..22: mol_type = other DNA
aataaacaggaataccgcaaat

SEQ ID NO: 70695 - DNA, 22 bp, synthetic construct
  misc_feature 1..22: note = chemically synthesized
  source 1..22: mol_type = other DNA
ataaacaggaataccgcaaatt

SEQ ID NO: 70696 - DNA, 22 bp, synthetic construct
  misc_feature 1..22: note = chemically synthesized
  source 1..22: mol_type = other DNA
tatttctcacagattttaaacc

SEQ ID NO: 70697 - DNA, 22 bp, synthetic construct
  misc_feature 1..22: note = chemically synthesized
  source 1..22: mol_type = other DNA
tttctcacagattttaaaccag

SEQ ID NO: 70698 - DNA, 22 bp, synthetic construct
  misc_feature 1..22: note = chemically synthesized
  source 1..22: mol_type = other DNA
ctcacagattttaaaccagaaa

SEQ ID NO: 70699 - DNA, 22 bp, synthetic construct
  misc_feature 1..22: note = chemically synthesized
  source 1..22: mol_type = other DNA
tcacagattttaaaccagaaac

SEQ ID NO: 70700 - DNA, 22 bp, synthetic construct
  misc_feature 1..22: note = chemically synthesized
  source 1..22: mol_type = other DNA
acagattttaaaccagaaactc

SEQ ID NO: 70701 - DNA, 22 bp, synthetic construct
  misc_feature 1..22: note = chemically synthesized
  source 1..22: mol_type = other DNA
taaaccagaaactcttccagtg

SEQ ID NO: 70702 - DNA, 22 bp, synthetic construct
  misc_feature 1..22: note = chemically synthesized
  source 1..22: mol_type = other DNA
aaaccagaaactcttccagtgc

SEQ ID NO: 70703 - DNA, 22 bp, synthetic construct
  misc_feature 1..22: note = chemically synthesized
  source 1..22: mol_type = other DNA
aaccagaaactcttccagtgcc

SEQ ID NO: 70704 - DNA, 22 bp, synthetic construct
  misc_feature 1..22: note = chemically synthesized
  source 1..22: mol_type = other DNA
ttccagtgcctatattacctcc

SEQ ID NO: 70705 - DNA, 22 bp, synthetic construct
  misc_feature 1..22: note = chemically synthesized
  source 1..22: mol_type = other DNA
ccagtgcctatattacctcctt

SEQ ID NO: 70706 - DNA, 22 bp, synthetic construct
  misc_feature 1..22: note = chemically synthesized
  source 1..22: mol_type = other DNA
cagtgcctatattacctccttc

SEQ ID NO: 70707 - DNA, 22 bp, synthetic construct
  misc_feature 1..22: note = chemically synthesized
  source 1..22: mol_type = other DNA
tattacctccttcctgaaccca

SEQ ID NO: 70708 - DNA, 22 bp, synthetic construct
  misc_feature 1..22: note = chemically synthesized
  source 1..22: mol_type = other DNA
cctccttcctgaacccatttgc

SEQ ID NO: 70709 - DNA, 22 bp, synthetic construct
  misc_feature 1..22: note = chemically synthesized
  source 1..22: mol_type = other DNA
cttcctgaacccatttgctatc

SEQ ID NO: 70710 - DNA, 22 bp, synthetic construct
  misc_feature 1..22: note = chemically synthesized
  source 1..22: mol_type = other DNA
cctgaacccatttgctatcctc

SEQ ID NO: 70711 - DNA, 22 bp, synthetic construct
  misc_feature 1..22: note = chemically synthesized
  source 1..22: mol_type = other DNA
ctgaacccatttgctatcctct

SEQ ID NO: 70712 - DNA, 22 bp, synthetic construct
  misc_feature 1..22: note = chemically synthesized
  source 1..22: mol_type = other DNA
aacccatttgctatcctctctt

SEQ ID NO: 70713 - DNA, 22 bp, synthetic construct
  misc_feature 1..22: note = chemically synthesized
  source 1..22: mol_type = other DNA
gctatcctctctttgtttagga

SEQ ID NO: 70714 - DNA, 22 bp, synthetic construct
  misc_feature 1..22: note = chemically synthesized
  source 1..22: mol_type = other DNA
ctatcctctctttgtttaggac

SEQ ID NO: 70715 - DNA, 22 bp, synthetic construct
  misc_feature 1..22: note = chemically synthesized
  source 1..22: mol_type = other DNA
tcctctctttgtttaggaccta

SEQ ID NO: 70716 - DNA, 22 bp, synthetic construct
  misc_feature 1..22: note = chemically synthesized
  source 1..22: mol_type = other DNA
tctttgtttaggacctacaaaa

SEQ ID NO: 70717 - DNA, 22 bp, synthetic construct
  misc_feature 1..22: note = chemically synthesized
  source 1..22: mol_type = other DNA
tttgtttaggacctacaaaaag

SEQ ID NO: 70718 - DNA, 22 bp, synthetic construct
  misc_feature 1..22: note = chemically synthesized
  source 1..22: mol_type = other DNA
tgtttaggacctacaaaaaggc

SEQ ID NO: 70719 - DNA, 22 bp, synthetic construct
  misc_feature 1..22: note = chemically synthesized
  source 1..22: mol_type = other DNA
gtttaggacctacaaaaaggct

SEQ ID NO: 70720 - DNA, 22 bp, synthetic construct
  misc_feature 1..22: note = chemically synthesized
  source 1..22: mol_type = other DNA
tttaggacctacaaaaaggctg

SEQ ID NO: 70721 - DNA, 22 bp, synthetic construct
  misc_feature 1..22: note = chemically synthesized
  source 1..22: mol_type = other DNA
aggacctacaaaaaggctggaa

SEQ ID NO: 70722 - DNA, 22 bp, synthetic construct
  misc_feature 1..22: note = chemically synthesized
  source 1..22: mol_type = other DNA
ggacctacaaaaaggctggaac

SEQ ID NO: 70723 - DNA, 22 bp, synthetic construct
  misc_feature 1..22: note = chemically synthesized
  source 1..22: mol_type = other DNA
caaaaaggctggaaccaacaca

SEQ ID NO: 70724 - DNA, 22 bp, synthetic construct
  misc_feature 1..22: note = chemically synthesized
  source 1..22: mol_type = other DNA
gaaccaacacattacaaaggtt

SEQ ID NO: 70725 - DNA, 22 bp, synthetic construct
  misc_feature 1..22: note = chemically synthesized
  source 1..22: mol_type = other DNA
caaaggttgctaagaagtgagg

SEQ ID NO: 70726 - DNA, 22 bp, synthetic construct
  misc_feature 1..22: note = chemically synthesized
  source 1..22: mol_type = other DNA
ctaagaagtgaggtgaacacag

SEQ ID NO: 70727 - DNA, 22 bp, synthetic construct
  misc_feature 1..22: note = chemically synthesized
  source 1..22: mol_type = other DNA
agaagtgaggtgaacacagttc

SEQ ID NO: 70728 - DNA, 22 bp, synthetic construct
  misc_feature 1..22: note = chemically synthesized
  source 1..22: mol_type = other DNA
ttcatttgcactggccatggca

SEQ ID NO: 70729 - DNA, 22 bp, synthetic construct
  misc_feature 1..22: note = chemically synthesized
  source 1..22: mol_type = other DNA
catttgcactggccatggcaga

SEQ ID NO: 70730 - DNA, 22 bp, synthetic construct
  misc_feature 1..22: note = chemically synthesized
  source 1..22: mol_type = other DNA
atttgcactggccatggcagaa

SEQ ID NO: 70731 - DNA, 22 bp, synthetic construct
  misc_feature 1..22: note = chemically synthesized
  source 1..22: mol_type = other DNA
gcactggccatggcagaaagtg

SEQ ID NO: 70732 - DNA, 22 bp, synthetic construct
  misc_feature 1..22: note = chemically synthesized
  source 1..22: mol_type = other DNA
cactggccatggcagaaagtgt

SEQ ID NO: 70733 - DNA, 22 bp, synthetic construct
  misc_feature 1..22: note = chemically synthesized
  source 1..22: mol_type = other DNA
gccatggcagaaagtgtgaagt

SEQ ID NO: 70734 - DNA, 22 bp, synthetic construct
  misc_feature 1..22: note = chemically synthesized
  source 1..22: mol_type = other DNA
agtttttcccagggcattctgt

SEQ ID NO: 70735 - DNA, 22 bp, synthetic construct
  misc_feature 1..22: note = chemically synthesized
  source 1..22: mol_type = other DNA
ttcccagggcattctgtagata

SEQ ID NO: 70736 - DNA, 22 bp, synthetic construct
  misc_feature 1..22: note = chemically synthesized
  source 1..22: mol_type = other DNA
tcccagggcattctgtagatat

SEQ ID NO: 70737 - DNA, 22 bp, synthetic construct
  misc_feature 1..22: note = chemically synthesized
  source 1..22: mol_type = other DNA
cccagggcattctgtagatata

SEQ ID NO: 70738 - DNA, 22 bp, synthetic construct
  misc_feature 1..22: note = chemically synthesized
  source 1..22: mol_type = other DNA
ccagggcattctgtagatatag

SEQ ID NO: 70739 - DNA, 22 bp, synthetic construct
  misc_feature 1..22: note = chemically synthesized
  source 1..22: mol_type = other DNA
tgtagatatagaactgtttatt

SEQ ID NO: 70740 - DNA, 22 bp, synthetic construct
  misc_feature 1..22: note = chemically synthesized
  source 1..22: mol_type = other DNA
tagatatagaactgtttattta

SEQ ID NO: 70741 - DNA, 22 bp, synthetic construct
  misc_feature 1..22: note = chemically synthesized
  source 1..22: mol_type = other DNA
tttatttaaataccatttttgt

SEQ ID NO: 70742 - DNA, 22 bp, synthetic construct
  misc_feature 1..22: note = chemically synthesized
  source 1..22: mol_type = other DNA
atttaaataccatttttgtata

SEQ ID NO: 70743 - DNA, 22 bp, synthetic construct
  misc_feature 1..22: note = chemically synthesized
  source 1..22: mol_type = other DNA
tttaaataccatttttgtatat

SEQ ID NO: 70744 - DNA, 22 bp, synthetic construct
  misc_feature 1..22: note = chemically synthesized
  source 1..22: mol_type = other DNA
aaataccatttttgtatatgca

SEQ ID NO: 70745 - DNA, 22 bp, synthetic construct
  misc_feature 1..22: note = chemically synthesized
  source 1..22: mol_type = other DNA
aataccatttttgtatatgcaa

SEQ ID NO: 70746 - DNA, 22 bp, synthetic construct
  misc_feature 1..22: note = chemically synthesized
  source 1..22: mol_type = other DNA
ttgtatatgcaataagtacata

SEQ ID NO: 70747 - DNA, 22 bp, synthetic construct
  misc_feature 1..22: note = chemically synthesized
  source 1..22: mol_type = other DNA
tgtatatgcaataagtacatat

SEQ ID NO: 70748 - DNA, 22 bp, synthetic construct
  misc_feature 1..22: note = chemically synthesized
  source 1..22: mol_type = other DNA
gtatatgcaataagtacatatt

SEQ ID NO: 70749 - DNA, 22 bp, synthetic construct
  misc_feature 1..22: note = chemically synthesized
  source 1..22: mol_type = other DNA
tatatgcaataagtacatattg

SEQ ID NO: 70750 - DNA, 22 bp, synthetic construct
  misc_feature 1..22: note = chemically synthesized
  source 1..22: mol_type = other DNA
tatataatcataatgctagaag

SEQ ID NO: 70751 - DNA, 22 bp, synthetic construct
  misc_feature 1..22: note = chemically synthesized
  source 1..22: mol_type = other DNA
gaagtgagaacttgaaaggaag

SEQ ID NO: 70752 - DNA, 22 bp, synthetic construct
  misc_feature 1..22: note = chemically synthesized
  source 1..22: mol_type = other DNA
gaaaggaagtggcgggagatgg

SEQ ID NO: 70753 - DNA, 22 bp, synthetic construct
  misc_feature 1..22: note = chemically synthesized
  source 1..22: mol_type = other DNA
aaaggaagtggcgggagatggc

SEQ ID NO: 70754 - DNA, 22 bp, synthetic construct
  misc_feature 1..22: note = chemically synthesized
  source 1..22: mol_type = other DNA
aggtataattccaattggagaa

SEQ ID NO: 70755 - DNA, 22 bp, synthetic construct
  misc_feature 1..22: note = chemically synthesized
  source 1..22: mol_type = other DNA
ggtataattccaattggagaaa

SEQ ID NO: 70756 - DNA, 22 bp, synthetic construct
  misc_feature 1..22: note = chemically synthesized
  source 1..22: mol_type = other DNA
caattggagaaataaggaaatg

SEQ ID NO: 70757 - DNA, 22 bp, synthetic construct
  misc_feature 1..22: note = chemically synthesized
  source 1..22: mol_type = other DNA
gagaaataaggaaatgaggtgg

SEQ ID NO: 70758 - DNA, 22 bp, synthetic construct
  misc_feature 1..22: note = chemically synthesized
  source 1..22: mol_type = other DNA
attcacagacacagtttgctga

SEQ ID NO: 70759 - DNA, 22 bp, synthetic construct
  misc_feature 1..22: note = chemically synthesized
  source 1..22: mol_type = other DNA
ttcacagacacagtttgctgaa

SEQ ID NO: 70760 - DNA, 22 bp, synthetic construct
  misc_feature 1..22: note = chemically synthesized
  source 1..22: mol_type = other DNA
acagacacagtttgctgaaagg

SEQ ID NO: 70761 - DNA, 22 bp, synthetic construct
  misc_feature 1..22: note = chemically synthesized
  source 1..22: mol_type = other DNA
gctgaaaggtactgggattatt

SEQ ID NO: 70762 - DNA, 22 bp, synthetic construct
  misc_feature 1..22: note = chemically synthesized
  source 1..22: mol_type = other DNA
ctgaaaggtactgggattattt

SEQ ID NO: 70763 - DNA, 22 bp, synthetic construct
  misc_feature 1..22: note = chemically synthesized
  source 1..22: mol_type = other DNA
aaaggtactgggattatttcgg

SEQ ID NO: 70764 - DNA, 22 bp, synthetic construct
  misc_feature 1..22: note = chemically synthesized
  source 1..22: mol_type = other DNA
ggattatttcgggccttcctga

SEQ ID NO: 70765 - DNA, 22 bp, synthetic construct
  misc_feature 1..22: note = chemically synthesized
  source 1..22: mol_type = other DNA
tttcgggccttcctgaaaagga

SEQ ID NO: 70766 - DNA, 22 bp, synthetic construct
  misc_feature 1..22: note = chemically synthesized
  source 1..22: mol_type = other DNA
cgggccttcctgaaaaggagtt

SEQ ID NO: 70767 - DNA, 22 bp, synthetic construct
  misc_feature 1..22: note = chemically synthesized
  source 1..22: mol_type = other DNA
gggccttcctgaaaaggagttg

SEQ ID NO: 70768 - DNA, 22 bp, synthetic construct
  misc_feature 1..22: note = chemically synthesized
  source 1..22: mol_type = other DNA
cctgaaaaggagttgagaagcc

SEQ ID NO: 70769 - DNA, 22 bp, synthetic construct
  misc_feature 1..22: note = chemically synthesized
  source 1..22: mol_type = other DNA
ctgaaaaggagttgagaagcct

SEQ ID NO: 70770 - DNA, 22 bp, synthetic construct
  misc_feature 1..22: note = chemically synthesized
  source 1..22: mol_type = other DNA
aaaaggagttgagaagcctcag

SEQ ID NO: 70771 - DNA, 22 bp, synthetic construct
  misc_feature 1..22: note = chemically synthesized
  source 1..22: mol_type = other DNA
agaagcctcaggccccatcctc

SEQ ID NO: 70772 - DNA, 22 bp, synthetic construct
  misc_feature 1..22: note = chemically synthesized
  source 1..22: mol_type = other DNA
aggccccatcctctcctgcttg

SEQ ID NO: 70773 - DNA, 22 bp, synthetic construct
  misc_feature 1..22: note = chemically synthesized
  source 1..22: mol_type = other DNA
tcctgcttgtagtactttgctc

SEQ ID NO: 70774 - DNA, 22 bp, synthetic construct
  misc_feature 1..22: note = chemically synthesized
  source 1..22: mol_type = other DNA
ctgcttgtagtactttgctcac

SEQ ID NO: 70775 - DNA, 22 bp, synthetic construct
  misc_feature 1..22: note = chemically synthesized
  source 1..22: mol_type = other DNA
cttgtagtactttgctcacaga

SEQ ID NO: 70776 - DNA, 22 bp, synthetic construct
  misc_feature 1..22: note = chemically synthesized
  source 1..22: mol_type = other DNA
gtagtactttgctcacagagac

SEQ ID NO: 70777 - DNA, 22 bp, synthetic construct
  misc_feature 1..22: note = chemically synthesized
  source 1..22: mol_type = other DNA
tagtactttgctcacagagact

SEQ ID NO: 70778 - DNA, 22 bp, synthetic construct
  misc_feature 1..22: note = chemically synthesized
  source 1..22: mol_type = other DNA
tgctcacagagactgagggagg

SEQ ID NO: 70779 - DNA, 22 bp, synthetic construct
  misc_feature 1..22: note = chemically synthesized
  source 1..22: mol_type = other DNA
gctcacagagactgagggagga

SEQ ID NO: 70780 - DNA, 22 bp, synthetic construct
  misc_feature 1..22: note = chemically synthesized
  source 1..22: mol_type = other DNA
ctcacagagactgagggaggaa

SEQ ID NO: 70781 - DNA, 22 bp, synthetic construct
  misc_feature 1..22: note = chemically synthesized
  source 1..22: mol_type = other DNA
acagagactgagggaggaaata

SEQ ID NO: 70782 - DNA, 22 bp, synthetic construct
  misc_feature 1..22: note = chemically synthesized
  source 1..22: mol_type = other DNA
agggaggaaatacagtgttttc

SEQ ID NO: 70783 - DNA, 22 bp, synthetic construct
  misc_feature 1..22: note = chemically synthesized
  source 1..22: mol_type = other DNA
tcttgttttaagcctcttttcc

SEQ ID NO: 70784 - DNA, 22 bp, synthetic construct
  misc_feature 1..22: note = chemically synthesized
  source 1..22: mol_type = other DNA
cttgttttaagcctcttttccc

SEQ ID NO: 70785 - DNA, 22 bp, synthetic construct
  misc_feature 1..22: note = chemically synthesized
  source 1..22: mol_type = other DNA
ttgttttaagcctcttttcccc

SEQ ID NO: 70786 - DNA, 22 bp, synthetic construct
  misc_feature 1..22: note = chemically synthesized
  source 1..22: mol_type = other DNA
gttttaagcctcttttccccct

SEQ ID NO: 70787 - DNA, 22 bp, synthetic construct
  misc_feature 1..22: note = chemically synthesized
  source 1..22: mol_type = other DNA
ttttaagcctcttttccccctc

SEQ ID NO: 70788 - DNA, 22 bp, synthetic construct
  misc_feature 1..22: note = chemically synthesized
  source 1..22: mol_type = other DNA
taagcctcttttccccctccgt

SEQ ID NO: 70789 - DNA, 22 bp, synthetic construct
  misc_feature 1..22: note = chemically synthesized
  source 1..22: mol_type = other DNA
aagcctcttttccccctccgta

SEQ ID NO: 70790 - DNA, 22 bp, synthetic construct
  misc_feature 1..22: note = chemically synthesized
  source 1..22: mol_type = other DNA
agcctcttttccccctccgtac

SEQ ID NO: 70791 - DNA, 22 bp, synthetic construct
  misc_feature 1..22: note = chemically synthesized
  source 1..22: mol_type = other DNA
ttttccccctccgtacacacat

SEQ ID NO: 70792 - DNA, 22 bp, synthetic construct
  misc_feature 1..22: note = chemically synthesized
  source 1..22: mol_type = other DNA
ttccccctccgtacacacatga

SEQ ID NO: 70793 - DNA, 22 bp, synthetic construct
  misc_feature 1..22: note = chemically synthesized
  source 1..22: mol_type = other DNA
tccccctccgtacacacatgaa

SEQ ID NO: 70794 - DNA, 22 bp, synthetic construct
  misc_feature 1..22: note = chemically synthesized
  source 1..22: mol_type = other DNA
ccccctccgtacacacatgaac

SEQ ID NO: 70795 - DNA, 22 bp, synthetic construct
  misc_feature 1..22: note = chemically synthesized
  source 1..22: mol_type = other DNA
cccctccgtacacacatgaaca

SEQ ID NO: 70796 - DNA, 22 bp, synthetic construct
  misc_feature 1..22: note = chemically synthesized
  source 1..22: mol_type = other DNA
cgtacacacatgaacatgactt

SEQ ID NO: 70797 - DNA, 22 bp, synthetic construct
  misc_feature 1..22: note = chemically synthesized
  source 1..22: mol_type = other DNA
cttatgactgtgttgtaactgt

SEQ ID NO: 70798 - DNA, 22 bp, synthetic construct
  misc_feature 1..22: note = chemically synthesized
  source 1..22: mol_type = other DNA
ttatgactgtgttgtaactgtg

SEQ ID NO: 70799 - DNA, 22 bp, synthetic construct
  misc_feature 1..22: note = chemically synthesized
  source 1..22: mol_type = other DNA
atgactgtgttgtaactgtgtg

SEQ ID NO: 70800 - DNA, 22 bp, synthetic construct
  misc_feature 1..22: note = chemically synthesized
  source 1..22: mol_type = other DNA
tgactgtgttgtaactgtgtgt

SEQ ID NO: 70801 - DNA, 22 bp, synthetic construct
  misc_feature 1..22: note = chemically synthesized
  source 1..22: mol_type = other DNA
tgttgtaactgtgtgttcctca

SEQ ID NO: 70802 - DNA, 22 bp, synthetic construct
  misc_feature 1..22: note = chemically synthesized
  source 1..22: mol_type = other DNA
taactgtgtgttcctcattacg

SEQ ID NO: 70803 - DNA, 22 bp, synthetic construct
  misc_feature 1..22: note = chemically synthesized
  source 1..22: mol_type = other DNA
tgtgttcctcattacgattctg

SEQ ID NO: 70804 - DNA, 22 bp, synthetic construct
  misc_feature 1..22: note = chemically synthesized
  source 1..22: mol_type = other DNA
ctcattacgattctgttactcc

SEQ ID NO: 70805 - DNA, 22 bp, synthetic construct
  misc_feature 1..22: note = chemically synthesized
  source 1..22: mol_type = other DNA
attacgattctgttactccatt

SEQ ID NO: 70806 - DNA, 22 bp, synthetic construct
  misc_feature 1..22: note = chemically synthesized
  source 1..22: mol_type = other DNA
cgattctgttactccattgtcc

SEQ ID NO: 70807 - DNA, 22 bp, synthetic construct
  misc_feature 1..22: note = chemically synthesized
  source 1..22: mol_type = other DNA
tgttactccattgtccctgggc

SEQ ID NO: 70808 - DNA, 22 bp, synthetic construct
  misc_feature 1..22: note = chemically synthesized
  source 1..22: mol_type = other DNA
ttactccattgtccctgggcct

SEQ ID NO: 70809 - DNA, 22 bp, synthetic construct
  misc_feature 1..22: note = chemically synthesized
  source 1..22: mol_type = other DNA
ctccattgtccctgggcctggt

SEQ ID NO: 70810 - DNA, 22 bp, synthetic construct
  misc_feature 1..22: note = chemically synthesized
  source 1..22: mol_type = other DNA
cattgtccctgggcctggtgtg

SEQ ID NO: 70811 - DNA, 22 bp, synthetic construct
  misc_feature 1..22: note = chemically synthesized
  source 1..22: mol_type = other DNA
tccctgggcctggtgtgttcag

SEQ ID NO: 70812 - DNA, 22 bp, synthetic construct
  misc_feature 1..22: note = chemically synthesized
  source 1..22: mol_type = other DNA
ggcctggtgtgttcaggaatgt

SEQ ID NO: 70813 - DNA, 22 bp, synthetic construct
  misc_feature 1..22: note = chemically synthesized
  source 1..22: mol_type = other DNA
gtgtgttcaggaatgtacccat

SEQ ID NO: 70814 - DNA, 22 bp, synthetic construct
  misc_feature 1..22: note = chemically synthesized
  source 1..22: mol_type = other DNA
aggaatgtacccatcccattct

SEQ ID NO: 70815 - DNA, 22 bp, synthetic construct
  misc_feature 1..22: note = chemically synthesized
  source 1..22: mol_type = other DNA
tctttttttcagacaacttccc

SEQ ID NO: 70816 - DNA, 22 bp, synthetic construct
  misc_feature 1..22: note = chemically synthesized
  source 1..22: mol_type = other DNA
tttttttcagacaacttcccat

SEQ ID NO: 70817 - DNA, 22 bp, synthetic construct
  misc_feature 1..22: note = chemically synthesized
  source 1..22: mol_type = other DNA
tttttcagacaacttcccataa

SEQ ID NO: 70818 - DNA, 22 bp, synthetic construct
  misc_feature 1..22: note = chemically synthesized
  source 1..22: mol_type = other DNA
ttttcagacaacttcccataaa

SEQ ID NO: 70819 - DNA, 22 bp, synthetic construct
  misc_feature 1..22: note = chemically synthesized
  source 1..22: mol_type = other DNA
tttcagacaacttcccataaaa

SEQ ID NO: 70820 - DNA, 22 bp, synthetic construct
  misc_feature 1..22: note = chemically synthesized
  source 1..22: mol_type = other DNA
ttcagacaacttcccataaaaa

SEQ ID NO: 70821 - DNA, 22 bp, synthetic construct
  misc_feature 1..22: note = chemically synthesized
  source 1..22: mol_type = other DNA
tcagacaacttcccataaaaaa

SEQ ID NO: 70822 - DNA, 22 bp, synthetic construct
  misc_feature 1..22: note = chemically synthesized
  source 1..22: mol_type = other DNA
cagacaacttcccataaaaaaa

SEQ ID NO: 70823 - DNA, 22 bp, synthetic construct
  misc_feature 1..22: note = chemically synthesized
  source 1..22: mol_type = other DNA
agacaacttcccataaaaaaaa

SEQ ID NO: 70824 - DNA, 22 bp, synthetic construct
  misc_feature 1..22: note = chemically synthesized
  source 1..22: mol_type = other DNA
cccataaaaaaaaaattgtggg

SEQ ID NO: 70825 - DNA, 22 bp, synthetic construct
  misc_feature 1..22: note = chemically synthesized
  source 1..22: mol_type = other DNA
ccataaaaaaaaaattgtggga

SEQ ID NO: 70826 - DNA, 22 bp, synthetic construct
  misc_feature 1..22: note = chemically synthesized
  source 1..22: mol_type = other DNA
tgggaactttgccgatatgagg

SEQ ID NO: 70827 - DNA, 22 bp, synthetic construct
  misc_feature 1..22: note = chemically synthesized
  source 1..22: mol_type = other DNA
tgccgatatgaggatgggattg

SEQ ID NO: 70828 - DNA, 22 bp, synthetic construct
  misc_feature 1..22: note = chemically synthesized
  source 1..22: mol_type = other DNA
gccgatatgaggatgggattgg

SEQ ID NO: 70829 - DNA, 22 bp, synthetic construct
  misc_feature 1..22: note = chemically synthesized
  source 1..22: mol_type = other DNA
ccgatatgaggatgggattggc

SEQ ID NO: 70830 - DNA, 22 bp, synthetic construct
  misc_feature 1..22: note = chemically synthesized
  source 1..22: mol_type = other DNA
gcagagttctctcaacctgctt

SEQ ID NO: 70831 - DNA, 22 bp, synthetic construct
  misc_feature 1..22: note = chemically synthesized
  source 1..22: mol_type = other DNA
tctcaacctgcttggaaaaatg

SEQ ID NO: 70832 - DNA, 22 bp, synthetic construct
  misc_feature 1..22: note = chemically synthesized
  source 1..22: mol_type = other DNA
tcaacctgcttggaaaaatgtt

SEQ ID NO: 70833 - DNA, 22 bp, synthetic construct
  misc_feature 1..22: note = chemically synthesized
  source 1..22: mol_type = other DNA
aacctgcttggaaaaatgtttc

SEQ ID NO: 70834 - DNA, 22 bp, synthetic construct
  misc_feature 1..22: note = chemically synthesized
  source 1..22: mol_type = other DNA
cttggaaaaatgtttcttaaaa

SEQ ID NO: 70835 - DNA, 22 bp, synthetic construct
  misc_feature 1..22: note = chemically synthesized
  source 1..22: mol_type = other DNA
ggaaaaatgtttcttaaaagac

SEQ ID NO: 70836 - DNA, 22 bp, synthetic construct
  misc_feature 1..22: note = chemically synthesized
  source 1..22: mol_type = other DNA
gaaaaatgtttcttaaaagact

SEQ ID NO: 70837 - DNA, 22 bp, synthetic construct
  misc_feature 1..22: note = chemically synthesized
  source 1..22: mol_type = other DNA
cttaaaagactgctaactttta

SEQ ID NO: 70838 - DNA, 22 bp, synthetic construct
  misc_feature 1..22: note = chemically synthesized
  source 1..22: mol_type = other DNA
ttaaaagactgctaacttttaa

SEQ ID NO: 70839 - DNA, 22 bp, synthetic construct
  misc_feature 1..22: note = chemically synthesized
  source 1..22: mol_type = other DNA
aaaagactgctaacttttaaaa

SEQ ID NO: 70840 - DNA, 22 bp, synthetic construct
  misc_feature 1..22: note = chemically synthesized
  source 1..22: mol_type = other DNA
aaagactgctaacttttaaaag

SEQ ID NO: 70841 - DNA, 22 bp, synthetic construct
  misc_feature 1..22: note = chemically synthesized
  source 1..22: mol_type = other DNA
ctaacttttaaaaggcatgagc

SEQ ID NO: 70842 - DNA, 22 bp, synthetic construct
  misc_feature 1..22: note = chemically synthesized
  source 1..22: mol_type = other DNA
acttttaaaaggcatgagccat

SEQ ID NO: 70843 - DNA, 22 bp, synthetic construct
  misc_feature 1..22: note = chemically synthesized
  source 1..22: mol_type = other DNA
ttaaaaggcatgagccatctag

SEQ ID NO: 70844 - DNA, 22 bp, synthetic construct
  misc_feature 1..22: note = chemically synthesized
  source 1..22: mol_type = other DNA
taaaaggcatgagccatctagc

SEQ ID NO: 70845 - DNA, 22 bp, synthetic construct
  misc_feature 1..22: note = chemically synthesized
  source 1..22: mol_type = other DNA
aaaaggcatgagccatctagca

SEQ ID NO: 70846 - DNA, 22 bp, synthetic construct
  misc_feature 1..22: note = chemically synthesized
  source 1..22: mol_type = other DNA
aaaggcatgagccatctagcag

SEQ ID NO: 70847 - DNA, 22 bp, synthetic construct
  misc_feature 1..22: note = chemically synthesized
  source 1..22: mol_type = other DNA
gcagattttcctagttgtctcc

SEQ ID NO: 70848 - DNA, 22 bp, synthetic construct
  misc_feature 1..22: note = chemically synthesized
  source 1..22: mol_type = other DNA
tcctagttgtctcctaaagccc

SEQ ID NO: 70849 - DNA, 22 bp, synthetic construct
  misc_feature 1..22: note = chemically synthesized
  source 1..22: mol_type = other DNA
cctagttgtctcctaaagccct

SEQ ID NO: 70850 - DNA, 22 bp, synthetic construct
  misc_feature 1..22: note = chemically synthesized
  source 1..22: mol_type = other DNA
ctagttgtctcctaaagccctg

SEQ ID NO: 70851 - DNA, 22 bp, synthetic construct
  misc_feature 1..22: note = chemically synthesized
  source 1..22: mol_type = other DNA
gttgtctcctaaagccctgcat

SEQ ID NO: 70852 - DNA, 22 bp, synthetic construct
  misc_feature 1..22: note = chemically synthesized
  source 1..22: mol_type = other DNA
tctcctaaagccctgcatattt

SEQ ID NO: 70853 - DNA, 22 bp, synthetic construct
  misc_feature 1..22: note = chemically synthesized
  source 1..22: mol_type = other DNA
ctaaagccctgcatatttccca

SEQ ID NO: 70854 - DNA, 22 bp, synthetic construct
  misc_feature 1..22: note = chemically synthesized
  source 1..22: mol_type = other DNA
aagccctgcatatttcccaata

SEQ ID NO: 70855 - DNA, 22 bp, synthetic construct
  misc_feature 1..22: note = chemically synthesized
  source 1..22: mol_type = other DNA
catatttcccaatagaaaataa

SEQ ID NO: 70856 - DNA, 22 bp, synthetic construct
  misc_feature 1..22: note = chemically synthesized
  source 1..22: mol_type = other DNA
cccaatagaaaataaacgaacc

SEQ ID NO: 70857 - DNA, 22 bp, synthetic construct
  misc_feature 1..22: note = chemically synthesized
  source 1..22: mol_type = other DNA
ccaatagaaaataaacgaaccc

SEQ ID NO: 70858 - DNA, 22 bp, synthetic construct
  misc_feature 1..22: note = chemically synthesized
  source 1..22: mol_type = other DNA
ttagagaaatggacatcagaac

SEQ ID NO: 70859 - DNA, 22 bp, synthetic construct
  misc_feature 1..22: note = chemically synthesized
  source 1..22: mol_type = other DNA
gagaaatggacatcagaacaca

SEQ ID NO: 70860 - DNA, 22 bp, synthetic construct
  misc_feature 1..22: note = chemically synthesized
  source 1..22: mol_type = other DNA
gtatgatgtgtatttactctag

SEQ ID NO: 70861 - DNA, 22 bp, synthetic construct
  misc_feature 1..22: note = chemically synthesized
  source 1..22: mol_type = other DNA
actctagggctgctatagctat

SEQ ID NO: 70862 - DNA, 22 bp, synthetic construct
  misc_feature 1..22: note = chemically synthesized
  source 1..22: mol_type = other DNA
ctctagggctgctatagctatg

SEQ ID NO: 70863 - DNA, 22 bp, synthetic construct
  misc_feature 1..22: note = chemically synthesized
  source 1..22: mol_type = other DNA
tagggctgctatagctatgaac

SEQ ID NO: 70864 - DNA, 22 bp, synthetic construct
  misc_feature 1..22: note = chemically synthesized
  source 1..22: mol_type = other DNA
gggctgctatagctatgaactg

SEQ ID NO: 70865 - DNA, 22 bp, synthetic construct
  misc_feature 1..22: note = chemically synthesized
  source 1..22: mol_type = other DNA
ctatagctatgaactgtggaca

SEQ ID NO: 70866 - DNA, 22 bp, synthetic construct
  misc_feature 1..22: note = chemically synthesized
  source 1..22: mol_type = other DNA
tagctatgaactgtggacatgg

SEQ ID NO: 70867 - DNA, 22 bp, synthetic construct
  misc_feature 1..22: note = chemically synthesized
  source 1..22: mol_type = other DNA
tgaactgtggacatgggttgtc

SEQ ID NO: 70868 - DNA, 22 bp, synthetic construct
  misc_feature 1..22: note = chemically synthesized
  source 1..22: mol_type = other DNA
tggacatgggttgtccggtctg

SEQ ID NO: 70869 - DNA, 22 bp, synthetic construct
  misc_feature 1..22: note = chemically synthesized
  source 1..22: mol_type = other DNA
tccggtctgcacttctgcttgc

SEQ ID NO: 70870 - DNA, 22 bp, synthetic construct
  misc_feature 1..22: note = chemically synthesized
  source 1..22: mol_type = other DNA
cacttctgcttgctggcatctc

SEQ ID NO: 70871 - DNA, 22 bp, synthetic construct
  misc_feature 1..22: note = chemically synthesized
  source 1..22: mol_type = other DNA
ctgcttgctggcatctcgttat

SEQ ID NO: 70872 - DNA, 22 bp, synthetic construct
  misc_feature 1..22: note = chemically synthesized
  source 1..22: mol_type = other DNA
tgcttgctggcatctcgttatc

SEQ ID NO: 70873 - DNA, 22 bp, synthetic construct
  misc_feature 1..22: note = chemically synthesized
  source 1..22: mol_type = other DNA
cttgctggcatctcgttatccc

SEQ ID NO: 70874 - DNA, 22 bp, synthetic construct
  misc_feature 1..22: note = chemically synthesized
  source 1..22: mol_type = other DNA
gctggcatctcgttatcccatt

SEQ ID NO: 70875 - DNA, 22 bp, synthetic construct
  misc_feature 1..22: note = chemically synthesized
  source 1..22: mol_type = other DNA
ctggcatctcgttatcccatta

SEQ ID NO: 70876 - DNA, 22 bp, synthetic construct
  misc_feature 1..22: note = chemically synthesized
  source 1..22: mol_type = other DNA
gcatctcgttatcccattagcc

SEQ ID NO: 70877 - DNA, 22 bp, synthetic construct
  misc_feature 1..22: note = chemically synthesized
  source 1..22: mol_type = other DNA
gttatcccattagcccgctgtt

SEQ ID NO: 70878 - DNA, 22 bp, synthetic construct
  misc_feature 1..22: note = chemically synthesized
  source 1..22: mol_type = other DNA
tcccattagcccgctgtttaat

SEQ ID NO: 70879 - DNA, 22 bp, synthetic construct
  misc_feature 1..22: note = chemically synthesized
  source 1..22: mol_type = other DNA
gcccgctgtttaatttactaca

SEQ ID NO: 70880 - DNA, 22 bp, synthetic construct
  misc_feature 1..22: note = chemically synthesized
  source 1..22: mol_type = other DNA
tttaatttactacatacagcac

SEQ ID NO: 70881 - DNA, 22 bp, synthetic construct
  misc_feature 1..22: note = chemically synthesized
  source 1..22: mol_type = other DNA
aatttactacatacagcacgag

SEQ ID NO: 70882 - DNA, 22 bp, synthetic construct
  misc_feature 1..22: note = chemically synthesized
  source 1..22: mol_type = other DNA
atttactacatacagcacgagg

SEQ ID NO: 70883 - DNA, 22 bp, synthetic construct
  misc_feature 1..22: note = chemically synthesized
  source 1..22: mol_type = other DNA
actacatacagcacgaggccag

SEQ ID NO: 70884 - DNA, 22 bp, synthetic construct
  misc_feature 1..22: note = chemically synthesized
  source 1..22: mol_type = other DNA
ctacatacagcacgaggccagt

SEQ ID NO: 70885 - DNA, 22 bp, synthetic construct
  misc_feature 1..22: note = chemically synthesized
  source 1..22: mol_type = other DNA
catacagcacgaggccagtgac

SEQ ID NO: 70886 - DNA, 22 bp, synthetic construct
  misc_feature 1..22: note = chemically synthesized
  source 1..22: mol_type = other DNA
agcctttaggggaatggggctg

SEQ ID NO: 70887 - DNA, 22 bp, synthetic construct
  misc_feature 1..22: note = chemically synthesized
  source 1..22: mol_type = other DNA
taggggaatggggctgtttctc

SEQ ID NO: 70888 - DNA, 22 bp, synthetic construct
  misc_feature 1..22: note = chemically synthesized
  source 1..22: mol_type = other DNA
aggggaatggggctgtttctct

SEQ ID NO: 70889 - DNA, 22 bp, synthetic construct
  misc_feature 1..22: note = chemically synthesized
  source 1..22: mol_type = other DNA
ggggaatggggctgtttctctc

SEQ ID NO: 70890 - DNA, 22 bp, synthetic construct
  misc_feature 1..22: note = chemically synthesized
  source 1..22: mol_type = other DNA
tttctctctctctctctctctt

SEQ ID NO: 70891 - DNA, 22 bp, synthetic construct
  misc_feature 1..22: note = chemically synthesized
  source 1..22: mol_type = other DNA
ctctctctctctctctctttct

SEQ ID NO: 70892 - DNA, 22 bp, synthetic construct
  misc_feature 1..22: note = chemically synthesized
  source 1..22: mol_type = other DNA
tctctctctctctctctttctc

SEQ ID NO: 70893 - DNA, 22 bp, synthetic construct
  misc_feature 1..22: note = chemically synthesized
  source 1..22: mol_type = other DNA
tctctctctctctctttctctc

SEQ ID NO: 70894 - DNA, 22 bp, synthetic construct
  misc_feature 1..22: note = chemically synthesized
  source 1..22: mol_type = other DNA
tctctctctctctttctctctc

SEQ ID NO: 70895 - DNA, 22 bp, synthetic construct
  misc_feature 1..22: note = chemically synthesized
  source 1..22: mol_type = other DNA
tctctctctctttctctctctc

SEQ ID NO: 70896 - DNA, 22 bp, synthetic construct
  misc_feature 1..22: note = chemically synthesized
  source 1..22: mol_type = other DNA
tctctctctttctctctctcta

SEQ ID NO: 70897 - DNA, 22 bp, synthetic construct
  misc_feature 1..22: note = chemically synthesized
  source 1..22: mol_type = other DNA
tctctctttctctctctctatt

SEQ ID NO: 70898 - DNA, 22 bp, synthetic construct
  misc_feature 1..22: note = chemically synthesized
  source 1..22: mol_type = other DNA
tctctttctctctctctatttc

SEQ ID NO: 70899 - DNA, 22 bp, synthetic construct
  misc_feature 1..22: note = chemically synthesized
  source 1..22: mol_type = other DNA
tctttctctctctctatttccc

SEQ ID NO: 70900 - DNA, 22 bp, synthetic construct
  misc_feature 1..22: note = chemically synthesized
  source 1..22: mol_type = other DNA
tttctctctctctatttcccag

SEQ ID NO: 70901 - DNA, 22 bp, synthetic construct
  misc_feature 1..22: note = chemically synthesized
  source 1..22: mol_type = other DNA
tctctctctctatttcccagcg

SEQ ID NO: 70902 - DNA, 22 bp, synthetic construct
  misc_feature 1..22: note = chemically synthesized
  source 1..22: mol_type = other DNA
ctctctctctatttcccagcgt

SEQ ID NO: 70903 - DNA, 22 bp, synthetic construct
  misc_feature 1..22: note = chemically synthesized
  source 1..22: mol_type = other DNA
tctctctctatttcccagcgtc

SEQ ID NO: 70904 - DNA, 22 bp, synthetic construct
  misc_feature 1..22: note = chemically synthesized
  source 1..22: mol_type = other DNA
tctctctatttcccagcgtcat

SEQ ID NO: 70905 - DNA, 22 bp, synthetic construct
  misc_feature 1..22: note = chemically synthesized
  source 1..22: mol_type = other DNA
tctctatttcccagcgtcatct

SEQ ID NO: 70906 - DNA, 22 bp, synthetic construct
  misc_feature 1..22: note = chemically synthesized
  source 1..22: mol_type = other DNA
tctatttcccagcgtcatctac

SEQ ID NO: 70907 - DNA, 22 bp, synthetic construct
  misc_feature 1..22: note = chemically synthesized
  source 1..22: mol_type = other DNA
tatttcccagcgtcatctacgg

SEQ ID NO: 70908 - DNA, 22 bp, synthetic construct
  misc_feature 1..22: note = chemically synthesized
  source 1..22: mol_type = other DNA
tttcccagcgtcatctacggtc

SEQ ID NO: 70909 - DNA, 22 bp, synthetic construct
  misc_feature 1..22: note = chemically synthesized
  source 1..22: mol_type = other DNA
cccagcgtcatctacggtcatg

SEQ ID NO: 70910 - DNA, 22 bp, synthetic construct
  misc_feature 1..22: note = chemically synthesized
  source 1..22: mol_type = other DNA
ccagcgtcatctacggtcatgg

SEQ ID NO: 70911 - DNA, 22 bp, synthetic construct
  misc_feature 1..22: note = chemically synthesized
  source 1..22: mol_type = other DNA
cggtcatgggataccattaatt

SEQ ID NO: 70912 - DNA, 22 bp, synthetic construct
  misc_feature 1..22: note = chemically synthesized
  source 1..22: mol_type = other DNA
attcctcccttccaaatgggaa

SEQ ID NO: 70913 - DNA, 22 bp, synthetic construct
  misc_feature 1..22: note = chemically synthesized
  source 1..22: mol_type = other DNA
ctcccttccaaatgggaaagag

SEQ ID NO: 70914 - DNA, 22 bp, synthetic construct
  misc_feature 1..22: note = chemically synthesized
  source 1..22: mol_type = other DNA
ccttccaaatgggaaagagacc

SEQ ID NO: 70915 - DNA, 22 bp, synthetic construct
  misc_feature 1..22: note = chemically synthesized
  source 1..22: mol_type = other DNA
ccaaatgggaaagagaccaatc

SEQ ID NO: 70916 - DNA, 22 bp, synthetic construct
  misc_feature 1..22: note = chemically synthesized
  source 1..22: mol_type = other DNA
caaatgggaaagagaccaatcc

SEQ ID NO: 70917 - DNA, 22 bp, synthetic construct
  misc_feature 1..22: note = chemically synthesized
  source 1..22: mol_type = other DNA
acacgggtcattgtacttgaga

SEQ ID NO: 70918 - DNA, 22 bp, synthetic construct
  misc_feature 1..22: note = chemically synthesized
  source 1..22: mol_type = other DNA
tacttgagaacctaaacttggc

SEQ ID NO: 70919 - DNA, 22 bp, synthetic construct
  misc_feature 1..22: note = chemically synthesized
  source 1..22: mol_type = other DNA
gagaacctaaacttggctgaac

SEQ ID NO: 70920 - DNA, 22 bp, synthetic construct
  misc_feature 1..22: note = chemically synthesized
  source 1..22: mol_type = other DNA
agaacctaaacttggctgaaca

SEQ ID NO: 70921 - DNA, 22 bp, synthetic construct
  misc_feature 1..22: note = chemically synthesized
  source 1..22: mol_type = other DNA
aacttggctgaacacagctcga

SEQ ID NO: 70922 - DNA, 22 bp, synthetic construct
  misc_feature 1..22: note = chemically synthesized
  source 1..22: mol_type = other DNA
ggctgaacacagctcgatggtt

SEQ ID NO: 70923 - DNA, 22 bp, synthetic construct
  misc_feature 1..22: note = chemically synthesized
  source 1..22: mol_type = other DNA
gctgaacacagctcgatggttg

SEQ ID NO: 70924 - DNA, 22 bp, synthetic construct
  misc_feature 1..22: note = chemically synthesized
  source 1..22: mol_type = other DNA
aacacagctcgatggttgatcc

SEQ ID NO: 70925 - DNA, 22 bp, synthetic construct
  misc_feature 1..22: note = chemically synthesized
  source 1..22: mol_type = other DNA
gatggttgatccaaatacgttt

SEQ ID NO: 70926 - DNA, 22 bp, synthetic construct
  misc_feature 1..22: note = chemically synthesized
  source 1..22: mol_type = other DNA
atccaaatacgtttttcctttc

SEQ ID NO: 70927 - DNA, 22 bp, synthetic construct
  misc_feature 1..22: note = chemically synthesized
  source 1..22: mol_type = other DNA
ttcctttctgtaaagtggcaaa

SEQ ID NO: 70928 - DNA, 22 bp, synthetic construct
  misc_feature 1..22: note = chemically synthesized
  source 1..22: mol_type = other DNA
tcctttctgtaaagtggcaaaa

SEQ ID NO: 70929 - DNA, 22 bp, synthetic construct
  misc_feature 1..22: note = chemically synthesized
  source 1..22: mol_type = other DNA
cctttctgtaaagtggcaaaaa

SEQ ID NO: 70930 - DNA, 22 bp, synthetic construct
  misc_feature 1..22: note = chemically synthesized
  source 1..22: mol_type = other DNA
ctttctgtaaagtggcaaaaac

SEQ ID NO: 70931 - DNA, 22 bp, synthetic construct
  misc_feature 1..22: note = chemically synthesized
  source 1..22: mol_type = other DNA
tctgtaaagtggcaaaaactat

SEQ ID NO: 70932 - DNA, 22 bp, synthetic construct
  misc_feature 1..22: note = chemically synthesized
  source 1..22: mol_type = other DNA
ctgtaaagtggcaaaaactatt

SEQ ID NO: 70933 - DNA, 22 bp, synthetic construct
  misc_feature 1..22: note = chemically synthesized
  source 1..22: mol_type = other DNA
tgtaaagtggcaaaaactattt

SEQ ID NO: 70934 - DNA, 22 bp, synthetic construct
  misc_feature 1..22: note = chemically synthesized
  source 1..22: mol_type = other DNA
taaagtggcaaaaactatttca

SEQ ID NO: 70935 - DNA, 22 bp, synthetic construct
  misc_feature 1..22: note = chemically synthesized
  source 1..22: mol_type = other DNA
tttcaagggagcacgtgtatca

SEQ ID NO: 70936 - DNA, 22 bp, synthetic construct
  misc_feature 1..22: note = chemically synthesized
  source 1..22: mol_type = other DNA
caagggagcacgtgtatcagat

SEQ ID NO: 70937 - DNA, 22 bp, synthetic construct
  misc_feature 1..22: note = chemically synthesized
  source 1..22: mol_type = other DNA
aagggagcacgtgtatcagatc

SEQ ID NO: 70938 - DNA, 22 bp, synthetic construct
  misc_feature 1..22: note = chemically synthesized
  source 1..22: mol_type = other DNA
tcatagggatggtagaaaaggc

SEQ ID NO: 70939 - DNA, 22 bp, synthetic construct
  misc_feature 1..22: note = chemically synthesized
  source 1..22: mol_type = other DNA
catagggatggtagaaaaggca

SEQ ID NO: 70940 - DNA, 22 bp, synthetic construct
  misc_feature 1..22: note = chemically synthesized
  source 1..22: mol_type = other DNA
atagggatggtagaaaaggcaa

SEQ ID NO: 70941 - DNA, 22 bp, synthetic construct
  misc_feature 1..22: note = chemically synthesized
  source 1..22: mol_type = other DNA
agccatttccccaagtatcctc

SEQ ID NO: 70942 - DNA, 22 bp, synthetic construct
  misc_feature 1..22: note = chemically synthesized
  source 1..22: mol_type = other DNA
ccccaagtatcctctaaagcgg

SEQ ID NO: 70943 - DNA, 22 bp, synthetic construct
  misc_feature 1..22: note = chemically synthesized
  source 1..22: mol_type = other DNA
cccaagtatcctctaaagcggg

SEQ ID NO: 70944 - DNA, 22 bp, synthetic construct
  misc_feature 1..22: note = chemically synthesized
  source 1..22: mol_type = other DNA
taaagcgggagcccctaaaccc

SEQ ID NO: 70945 - DNA, 22 bp, synthetic construct
  misc_feature 1..22: note = chemically synthesized
  source 1..22: mol_type = other DNA
aagcgggagcccctaaacccat

SEQ ID NO: 70946 - DNA, 22 bp, synthetic construct
  misc_feature 1..22: note = chemically synthesized
  source 1..22: mol_type = other DNA
aacccataggggggctgtgctt

SEQ ID NO: 70947 - DNA, 22 bp, synthetic construct
  misc_feature 1..22: note = chemically synthesized
  source 1..22: mol_type = other DNA
tgcttttaaatagctgtgaacg

SEQ ID NO: 70948 - DNA, 22 bp, synthetic construct
  misc_feature 1..22: note = chemically synthesized
  source 1..22: mol_type = other DNA
ttaaatagctgtgaacgtggta

SEQ ID NO: 70949 - DNA, 22 bp, synthetic construct
  misc_feature 1..22: note = chemically synthesized
  source 1..22: mol_type = other DNA
taaatagctgtgaacgtggtac

SEQ ID NO: 70950 - DNA, 22 bp, synthetic construct
  misc_feature 1..22: note = chemically synthesized
  source 1..22: mol_type = other DNA
aaatagctgtgaacgtggtaca

SEQ ID NO: 70951 - DNA, 22 bp, synthetic construct
  misc_feature 1..22: note = chemically synthesized
  source 1..22: mol_type = other DNA
aatagctgtgaacgtggtacat

SEQ ID NO: 70952 - DNA, 22 bp, synthetic construct
  misc_feature 1..22: note = chemically synthesized
  source 1..22: mol_type = other DNA
tgaacgtggtacatgcccatga

SEQ ID NO: 70953 - DNA, 22 bp, synthetic construct
  misc_feature 1..22: note = chemically synthesized
  source 1..22: mol_type = other DNA
tgtctattagaatttgaatatt

SEQ ID NO: 70954 - DNA, 22 bp, synthetic construct
  misc_feature 1..22: note = chemically synthesized
  source 1..22: mol_type = other DNA
gtctattagaatttgaatattg

SEQ ID NO: 70955 - DNA, 22 bp, synthetic construct
  misc_feature 1..22: note = chemically synthesized
  source 1..22: mol_type = other DNA
tctattagaatttgaatattgg

SEQ ID NO: 70956 - DNA, 22 bp, synthetic construct
  misc_feature 1..22: note = chemically synthesized
  source 1..22: mol_type = other DNA
ttagaatttgaatattggtagc

SEQ ID NO: 70957 - DNA, 22 bp, synthetic construct
  misc_feature 1..22: note = chemically synthesized
  source 1..22: mol_type = other DNA
gaatttgaatattggtagcagg

SEQ ID NO: 70958 - DNA, 22 bp, synthetic construct
  misc_feature 1..22: note = chemically synthesized
  source 1..22: mol_type = other DNA
gaatattggtagcaggttggac

SEQ ID NO: 70959 - DNA, 22 bp, synthetic construct
  misc_feature 1..22: note = chemically synthesized
  source 1..22: mol_type = other DNA
aatattggtagcaggttggacg

SEQ ID NO: 70960 - DNA, 22 bp, synthetic construct
  misc_feature 1..22: note = chemically synthesized
  source 1..22: mol_type = other DNA
gtagcaggttggacgaaagggt

SEQ ID NO: 70961 - DNA, 22 bp, synthetic construct
  misc_feature 1..22: note = chemically synthesized
  source 1..22: mol_type = other DNA
gacgaaagggtttgattggggt

SEQ ID NO: 70962 - DNA, 22 bp, synthetic construct
  misc_feature 1..22: note = chemically synthesized
  source 1..22: mol_type = other DNA
gattggggtatcagctaaaggg

SEQ ID NO: 70963 - DNA, 22 bp, synthetic construct
  misc_feature 1..22: note = chemically synthesized
  source 1..22: mol_type = other DNA
attggggtatcagctaaagggg

SEQ ID NO: 70964 - DNA, 22 bp, synthetic construct
  misc_feature 1..22: note = chemically synthesized
  source 1..22: mol_type = other DNA
gggtatcagctaaaggggcctc

SEQ ID NO: 70965 - DNA, 22 bp, synthetic construct
  misc_feature 1..22: note = chemically synthesized
  source 1..22: mol_type = other DNA
aaggggcctcgacgacagtgac

SEQ ID NO: 70966 - DNA, 22 bp, synthetic construct
  misc_feature 1..22: note = chemically synthesized
  source 1..22: mol_type = other DNA
gacgacagtgacttagcgctgg

SEQ ID NO: 70967 - DNA, 22 bp, synthetic construct
  misc_feature 1..22: note = chemically synthesized
  source 1..22: mol_type = other DNA
agcgctggactgggaatgggat

SEQ ID NO: 70968 - DNA, 22 bp, synthetic construct
  misc_feature 1..22: note = chemically synthesized
  source 1..22: mol_type = other DNA
gcgctggactgggaatgggatt

SEQ ID NO: 70969 - DNA, 22 bp, synthetic construct
  misc_feature 1..22: note = chemically synthesized
  source 1..22: mol_type = other DNA
gactgggaatgggattccccag

SEQ ID NO: 70970 - DNA, 22 bp, synthetic construct
  misc_feature 1..22: note = chemically synthesized
  source 1..22: mol_type = other DNA
ggaatgggattccccagaaccc

SEQ ID NO: 70971 - DNA, 22 bp, synthetic construct
  misc_feature 1..22: note = chemically synthesized
  source 1..22: mol_type = other DNA
cccagaacccacctggacgcag

SEQ ID NO: 70972 - DNA, 22 bp, synthetic construct
  misc_feature 1..22: note = chemically synthesized
  source 1..22: mol_type = other DNA
gacgcagcatgcccctcagccc

SEQ ID NO: 70973 - DNA, 22 bp, synthetic construct
  misc_feature 1..22: note = chemically synthesized
  source 1..22: mol_type = other DNA
agcccaggtctccgctgctctg

SEQ ID NO: 70974 - DNA, 22 bp, synthetic construct
  misc_feature 1..22: note = chemically synthesized
  source 1..22: mol_type = other DNA
cgctgctctgctcaggggtggg

SEQ ID NO: 70975 - DNA, 22 bp, synthetic construct
  misc_feature 1..22: note = chemically synthesized
  source 1..22: mol_type = other DNA
ctctgctcaggggtgggatgcg

SEQ ID NO: 70976 - DNA, 22 bp, synthetic construct
  misc_feature 1..22: note = chemically synthesized
  source 1..22: mol_type = other DNA
tgctcaggggtgggatgcgtga

SEQ ID NO: 70977 - DNA, 22 bp, synthetic construct
  misc_feature 1..22: note = chemically synthesized
  source 1..22: mol_type = other DNA
ctcaggggtgggatgcgtgaga

SEQ ID NO: 70978 - DNA, 22 bp, synthetic construct
  misc_feature 1..22: note = chemically synthesized
  source 1..22: mol_type = other DNA
aggggtgggatgcgtgagagca

SEQ ID NO: 70979 - DNA, 22 bp, synthetic construct
  misc_feature 1..22: note = chemically synthesized
  source 1..22: mol_type = other DNA
agatccagaccccgggcctcct

SEQ ID NO: 70980 - DNA, 22 bp, synthetic construct
  misc_feature 1..22: note = chemically synthesized
  source 1..22: mol_type = other DNA
ctgcggcgccaagtcaggggag

SEQ ID NO: 70981 - DNA, 22 bp, synthetic construct
  misc_feature 1..22: note = chemically synthesized
  source 1..22: mol_type = other DNA
cggcgccaagtcaggggagagg

SEQ ID NO: 70982 - DNA, 22 bp, synthetic construct
  misc_feature 1..22: note = chemically synthesized
  source 1..22: mol_type = other DNA
cttcgggtcgccatggcaacga

SEQ ID NO: 70983 - DNA, 22 bp, synthetic construct
  misc_feature 1..22: note = chemically synthesized
  source 1..22: mol_type = other DNA
cgggtcgccatggcaacgaggc

SEQ ID NO: 70984 - DNA, 22 bp, synthetic construct
  misc_feature 1..22: note = chemically synthesized
  source 1..22: mol_type = other DNA
gggtcgccatggcaacgaggcc

SEQ ID NO: 70985 - DNA, 22 bp, synthetic construct
  misc_feature 1..22: note = chemically synthesized
  source 1..22: mol_type = other DNA
gaatgccacagtggtagccctc

SEQ ID NO: 70986 - DNA, 22 bp, synthetic construct
  misc_feature 1..22: note = chemically synthesized
  source 1..22: mol_type = other DNA
ttcctcggcacatccggactcc

SEQ ID NO: 70987 - DNA, 22 bp, synthetic construct
  misc_feature 1..22: note = chemically synthesized
  source 1..22: mol_type = other DNA
cctcggcacatccggactccca

SEQ ID NO: 70988 - DNA, 22 bp, synthetic construct
  misc_feature 1..22: note = chemically synthesized
  source 1..22: mol_type = other DNA
ctcggcacatccggactcccag

SEQ ID NO: 70989 - DNA, 22 bp, synthetic construct
  misc_feature 1..22: note = chemically synthesized
  source 1..22: mol_type = other DNA
ggcacatccggactcccagttc

SEQ ID NO: 70990 - DNA, 22 bp, synthetic construct
  misc_feature 1..22: note = chemically synthesized
  source 1..22: mol_type = other DNA
ccagttctgctgcttcaagtca

SEQ ID NO: 70991 - DNA, 22 bp, synthetic construct
  misc_feature 1..22: note = chemically synthesized
  source 1..22: mol_type = other DNA
tgctgcttcaagtcaatgtcca

SEQ ID NO: 70992 - DNA, 22 bp, synthetic construct
  misc_feature 1..22: note = chemically synthesized
  source 1..22: mol_type = other DNA
ctgcttcaagtcaatgtccaca

SEQ ID NO: 70993 - DNA, 22 bp, synthetic construct
  misc_feature 1..22: note = chemically synthesized
  source 1..22: mol_type = other DNA
cttcaagtcaatgtccacagca

SEQ ID NO: 70994 - DNA, 22 bp, synthetic construct
  misc_feature 1..22: note = chemically synthesized
  source 1..22: mol_type = other DNA
caagtcaatgtccacagcaagg

SEQ ID NO: 70995 - DNA, 22 bp, synthetic construct
  misc_feature 1..22: note = chemically synthesized
  source 1..22: mol_type = other DNA
aagtcaatgtccacagcaaggg

SEQ ID NO: 70996 - DNA, 22 bp, synthetic construct
  misc_feature 1..22: note = chemically synthesized
  source 1..22: mol_type = other DNA
ccttcttcccttcaccattgcc

SEQ ID NO: 70997 - DNA, 22 bp, synthetic construct
  misc_feature 1..22: note = chemically synthesized
  source 1..22: mol_type = other DNA
cttcccttcaccattgccttcc

SEQ ID NO: 70998 - DNA, 22 bp, synthetic construct
  misc_feature 1..22: note = chemically synthesized
  source 1..22: mol_type = other DNA
ttcccttcaccattgccttccc

SEQ ID NO: 70999 - DNA, 22 bp, synthetic construct
  misc_feature 1..22: note = chemically synthesized
  source 1..22: mol_type = other DNA
cccttcaccattgccttccccc

SEQ ID NO: 71000 - DNA, 22 bp, synthetic construct
  misc_feature 1..22: note = chemically synthesized
  source 1..22: mol_type = other DNA
ccttcaccattgccttccccct

SEQ ID NO: 71001 - DNA, 22 bp, synthetic construct
  misc_feature 1..22: note = chemically synthesized
  source 1..22: mol_type = other DNA
caccattgccttcccccttcca

SEQ ID NO: 71002 - DNA, 22 bp, synthetic construct
  misc_feature 1..22: note = chemically synthesized
  source 1..22: mol_type = other DNA
accattgccttcccccttccaa

SEQ ID NO: 71003 - DNA, 22 bp, synthetic construct
  misc_feature 1..22: note = chemically synthesized
  source 1..22: mol_type = other DNA
ccttcccccttccaaaaaagaa

SEQ ID NO: 71004 - DNA, 22 bp, synthetic construct
  misc_feature 1..22: note = chemically synthesized
  source 1..22: mol_type = other DNA
cccccttccaaaaaagaaaaga

SEQ ID NO: 71005 - DNA, 22 bp, synthetic construct
  misc_feature 1..22: note = chemically synthesized
  source 1..22: mol_type = other DNA
ccccttccaaaaaagaaaagaa

SEQ ID NO: 71006 - DNA, 22 bp, synthetic construct
  misc_feature 1..22: note = chemically synthesized
  source 1..22: mol_type = other DNA
ccaaaaaagaaaagaaaactgc

SEQ ID NO: 71007 - DNA, 22 bp, synthetic construct
  misc_feature 1..22: note = chemically synthesized
  source 1..22: mol_type = other DNA
caaaaaagaaaagaaaactgca

SEQ ID NO: 71008 - DNA, 22 bp, synthetic construct
  misc_feature 1..22: note = chemically synthesized
  source 1..22: mol_type = other DNA
catgtttgaaagaaactacagg

SEQ ID NO: 71009 - DNA, 22 bp, synthetic construct
  misc_feature 1..22: note = chemically synthesized
  source 1..22: mol_type = other DNA
gaaagaaactacaggcagtttt

SEQ ID NO: 71010 - DNA, 22 bp, synthetic construct
  misc_feature 1..22: note = chemically synthesized
  source 1..22: mol_type = other DNA
aaagaaactacaggcagttttt

SEQ ID NO: 71011 - DNA, 22 bp, synthetic construct
  misc_feature 1..22: note = chemically synthesized
  source 1..22: mol_type = other DNA
caggcagtttttggtgcaattt

SEQ ID NO: 71012 - DNA, 22 bp, synthetic construct
  misc_feature 1..22: note = chemically synthesized
  source 1..22: mol_type = other DNA
ttggtgcaatttgagagcaact

SEQ ID NO: 71013 - DNA, 22 bp, synthetic construct
  misc_feature 1..22: note = chemically synthesized
  source 1..22: mol_type = other DNA
tggtgcaatttgagagcaactc

SEQ ID NO: 71014 - DNA, 22 bp, synthetic construct
  misc_feature 1..22: note = chemically synthesized
  source 1..22: mol_type = other DNA
ggtgcaatttgagagcaactct

SEQ ID NO: 71015 - DNA, 22 bp, synthetic construct
  misc_feature 1..22: note = chemically synthesized
  source 1..22: mol_type = other DNA
gtgcaatttgagagcaactctt

SEQ ID NO: 71016 - DNA, 22 bp, synthetic construct
  misc_feature 1..22: note = chemically synthesized
  source 1..22: mol_type = other DNA
gagagcaactcttttgggttct

SEQ ID NO: 71017 - DNA, 22 bp, synthetic construct
  misc_feature 1..22: note = chemically synthesized
  source 1..22: mol_type = other DNA
agagcaactcttttgggttctg

SEQ ID NO: 71018 - DNA, 22 bp, synthetic construct
  misc_feature 1..22: note = chemically synthesized
  source 1..22: mol_type = other DNA
ttttgggttctggttttctctt

SEQ ID NO: 71019 - DNA, 22 bp, synthetic construct
  misc_feature 1..22: note = chemically synthesized
  source 1..22: mol_type = other DNA
ttgggttctggttttctcttca

SEQ ID NO: 71020 - DNA, 22 bp, synthetic construct
  misc_feature 1..22: note = chemically synthesized
  source 1..22: mol_type = other DNA
tgggttctggttttctcttcag

SEQ ID NO: 71021 - DNA, 22 bp, synthetic construct
  misc_feature 1..22: note = chemically synthesized
  source 1..22: mol_type = other DNA
gggttctggttttctcttcaga

SEQ ID NO: 71022 - DNA, 22 bp, synthetic construct
  misc_feature 1..22: note = chemically synthesized
  source 1..22: mol_type = other DNA
ggttctggttttctcttcagag

SEQ ID NO: 71023 - DNA, 22 bp, synthetic construct
  misc_feature 1..22: note = chemically synthesized
  source 1..22: mol_type = other DNA
tggttttctcttcagagatttg

SEQ ID NO: 71024 - DNA, 22 bp, synthetic construct
  misc_feature 1..22: note = chemically synthesized
  source 1..22: mol_type = other DNA
gttttctcttcagagatttgtt

SEQ ID NO: 71025 - DNA, 22 bp, synthetic construct
  misc_feature 1..22: note = chemically synthesized
  source 1..22: mol_type = other DNA
tctcttcagagatttgttcgcc

SEQ ID NO: 71026 - DNA, 22 bp, synthetic construct
  misc_feature 1..22: note = chemically synthesized
  source 1..22: mol_type = other DNA
ctcttcagagatttgttcgcct

SEQ ID NO: 71027 - DNA, 22 bp, synthetic construct
  misc_feature 1..22: note = chemically synthesized
  source 1..22: mol_type = other DNA
tcttcagagatttgttcgcctc

SEQ ID NO: 71028 - DNA, 22 bp, synthetic construct
  misc_feature 1..22: note = chemically synthesized
  source 1..22: mol_type = other DNA
ttcagagatttgttcgcctctt

SEQ ID NO: 71029 - DNA, 22 bp, synthetic construct
  misc_feature 1..22: note = chemically synthesized
  source 1..22: mol_type = other DNA
cagagatttgttcgcctcttgt

SEQ ID NO: 71030 - DNA, 22 bp, synthetic construct
  misc_feature 1..22: note = chemically synthesized
  source 1..22: mol_type = other DNA
agagatttgttcgcctcttgta

SEQ ID NO: 71031 - DNA, 22 bp, synthetic construct
  misc_feature 1..22: note = chemically synthesized
  source 1..22: mol_type = other DNA
gttcgcctcttgtaaatcattg

SEQ ID NO: 71032 - DNA, 22 bp, synthetic construct
  misc_feature 1..22: note = chemically synthesized
  source 1..22: mol_type = other DNA
ttcgcctcttgtaaatcattgg

SEQ ID NO: 71033 - DNA, 22 bp, synthetic construct
  misc_feature 1..22: note = chemically synthesized
  source 1..22: mol_type = other DNA
gcctcttgtaaatcattggctg

SEQ ID NO: 71034 - DNA, 22 bp, synthetic construct
  misc_feature 1..22: note = chemically synthesized
  source 1..22: mol_type = other DNA
ttgtaaatcattggctgctttg

SEQ ID NO: 71035 - DNA, 22 bp, synthetic construct
  misc_feature 1..22: note = chemically synthesized
  source 1..22: mol_type = other DNA
gtaaatcattggctgctttgac

SEQ ID NO: 71036 - DNA, 22 bp, synthetic construct
  misc_feature 1..22: note = chemically synthesized
  source 1..22: mol_type = other DNA
taaatcattggctgctttgacg

SEQ ID NO: 71037 - DNA, 22 bp, synthetic construct
  misc_feature 1..22: note = chemically synthesized
  source 1..22: mol_type = other DNA
gctgctttgacgttgaacttga

SEQ ID NO: 71038 - DNA, 22 bp, synthetic construct
  misc_feature 1..22: note = chemically synthesized
  source 1..22: mol_type = other DNA
ctttgacgttgaacttgatgac

SEQ ID NO: 71039 - DNA, 22 bp, synthetic construct
  misc_feature 1..22: note = chemically synthesized
  source 1..22: mol_type = other DNA
tgacgttgaacttgatgacatt

SEQ ID NO: 71040 - DNA, 22 bp, synthetic construct
  misc_feature 1..22: note = chemically synthesized
  source 1..22: mol_type = other DNA
gacgttgaacttgatgacattt

SEQ ID NO: 71041 - DNA, 22 bp, synthetic construct
  misc_feature 1..22: note = chemically synthesized
  source 1..22: mol_type = other DNA
acgttgaacttgatgacatttc

SEQ ID NO: 71042 - DNA, 22 bp, synthetic construct
  misc_feature 1..22: note = chemically synthesized
  source 1..22: mol_type = other DNA
aacttgatgacatttcatgttt

SEQ ID NO: 71043 - DNA, 22 bp, synthetic construct
  misc_feature 1..22: note = chemically synthesized
  source 1..22: mol_type = other DNA
gatgacatttcatgttttcgtt

SEQ ID NO: 71044 - DNA, 22 bp, synthetic construct
  misc_feature 1..22: note = chemically synthesized
  source 1..22: mol_type = other DNA
atgacatttcatgttttcgttg

SEQ ID NO: 71045 - DNA, 22 bp, synthetic construct
  misc_feature 1..22: note = chemically synthesized
  source 1..22: mol_type = other DNA
catgttttcgttgtgctgcttt

SEQ ID NO: 71046 - DNA, 22 bp, synthetic construct
  misc_feature 1..22: note = chemically synthesized
  source 1..22: mol_type = other DNA
atgttttcgttgtgctgctttt

SEQ ID NO: 71047 - DNA, 22 bp, synthetic construct
  misc_feature 1..22: note = chemically synthesized
  source 1..22: mol_type = other DNA
tcgttgtgctgcttttacatca

SEQ ID NO: 71048 - DNA, 22 bp, synthetic construct
  misc_feature 1..22: note = chemically synthesized
  source 1..22: mol_type = other DNA
cgttgtgctgcttttacatcag

SEQ ID NO: 71049 - DNA, 22 bp, synthetic construct
  misc_feature 1..22: note = chemically synthesized
  source 1..22: mol_type = other DNA
gttgtgctgcttttacatcagt

SEQ ID NO: 71050 - DNA, 22 bp, synthetic construct
  misc_feature 1..22: note = chemically synthesized
  source 1..22: mol_type = other DNA
tgctgcttttacatcagttttg

SEQ ID NO: 71051 - DNA, 22 bp, synthetic construct
  misc_feature 1..22: note = chemically synthesized
  source 1..22: mol_type = other DNA
cttttacatcagttttgatttt

SEQ ID NO: 71052 - DNA, 22 bp, synthetic construct
  misc_feature 1..22: note = chemically synthesized
  source 1..22: mol_type = other DNA
ttacatcagttttgattttttg

SEQ ID NO: 71053 - DNA, 22 bp, synthetic construct
  misc_feature 1..22: note = chemically synthesized
  source 1..22: mol_type = other DNA
tacatcagttttgattttttgt

SEQ ID NO: 71054 - DNA, 22 bp, synthetic construct
  misc_feature 1..22: note = chemically synthesized
  source 1..22: mol_type = other DNA
acatcagttttgattttttgtt

SEQ ID NO: 71055 - DNA, 22 bp, synthetic construct
  misc_feature 1..22: note = chemically synthesized
  source 1..22: mol_type = other DNA
catcagttttgattttttgttt

SEQ ID NO: 71056 - DNA, 22 bp, synthetic construct
  misc_feature 1..22: note = chemically synthesized
  source 1..22: mol_type = other DNA
tgattttttgtttctttataat

SEQ ID NO: 71057 - DNA, 22 bp, synthetic construct
  misc_feature 1..22: note = chemically synthesized
  source 1..22: mol_type = other DNA
gattttttgtttctttataatt

SEQ ID NO: 71058 - DNA, 22 bp, synthetic construct
  misc_feature 1..22: note = chemically synthesized
  source 1..22: mol_type = other DNA
attttttgtttctttataattt

SEQ ID NO: 71059 - DNA, 22 bp, synthetic construct
  misc_feature 1..22: note = chemically synthesized
  source 1..22: mol_type = other DNA
tttgtttctttataattttatt

SEQ ID NO: 71060 - DNA, 22 bp, synthetic construct
  misc_feature 1..22: note = chemically synthesized
  source 1..22: mol_type = other DNA
ttgtttctttataattttatta

SEQ ID NO: 71061 - DNA, 22 bp, synthetic construct
  misc_feature 1..22: note = chemically synthesized
  source 1..22: mol_type = other DNA
tgtttctttataattttattat

SEQ ID NO: 71062 - DNA, 22 bp, synthetic construct
  misc_feature 1..22: note = chemically synthesized
  source 1..22: mol_type = other DNA
gtttctttataattttattatt

SEQ ID NO: 71063 - DNA, 22 bp, synthetic construct
  misc_feature 1..22: note = chemically synthesized
  source 1..22: mol_type = other DNA
tttctttataattttattatta

SEQ ID NO: 71064 - DNA, 22 bp, synthetic construct
  misc_feature 1..22: note = chemically synthesized
  source 1..22: mol_type = other DNA
ctttataattttattattattt

SEQ ID NO: 71065 - DNA, 22 bp, synthetic construct
  misc_feature 1..22: note = chemically synthesized
  source 1..22: mol_type = other DNA
tttataattttattattatttt

SEQ ID NO: 71066 - DNA, 22 bp, synthetic construct
  misc_feature 1..22: note = chemically synthesized
  source 1..22: mol_type = other DNA
tataattttattattattttga

SEQ ID NO: 71067 - DNA, 22 bp, synthetic construct
  misc_feature 1..22: note = chemically synthesized
  source 1..22: mol_type = other DNA
ataattttattattattttgag

SEQ ID NO: 71068 - DNA, 22 bp, synthetic construct
  misc_feature 1..22: note = chemically synthesized
  source 1..22: mol_type = other DNA
taattttattattattttgaga

SEQ ID NO: 71069 - DNA, 22 bp, synthetic construct
  misc_feature 1..22: note = chemically synthesized
  source 1..22: mol_type = other DNA
tattattattttgagaaggtgt

SEQ ID NO: 71070 - DNA, 22 bp, synthetic construct
  misc_feature 1..22: note = chemically synthesized
  source 1..22: mol_type = other DNA
attattattttgagaaggtgtc

SEQ ID NO: 71071 - DNA, 22 bp, synthetic construct
  misc_feature 1..22: note = chemically synthesized
  source 1..22: mol_type = other DNA
ttattattttgagaaggtgtcc

SEQ ID NO: 71072 - DNA, 22 bp, synthetic construct
  misc_feature 1..22: note = chemically synthesized
  source 1..22: mol_type = other DNA
ttattttgagaaggtgtcccct

SEQ ID NO: 71073 - DNA, 22 bp, synthetic construct
  misc_feature 1..22: note = chemically synthesized
  source 1..22: mol_type = other DNA
ttttgagaaggtgtcccctttc

SEQ ID NO: 71074 - DNA, 22 bp, synthetic construct
  misc_feature 1..22: note = chemically synthesized
  source 1..22: mol_type = other DNA
tgagaaggtgtcccctttccct

SEQ ID NO: 71075 - DNA, 22 bp, synthetic construct
  misc_feature 1..22: note = chemically synthesized
  source 1..22: mol_type = other DNA
gagaaggtgtcccctttccctc

SEQ ID NO: 71076 - DNA, 22 bp, synthetic construct
  misc_feature 1..22: note = chemically synthesized
  source 1..22: mol_type = other DNA
agaaggtgtcccctttccctcc

SEQ ID NO: 71077 - DNA, 22 bp, synthetic construct
  misc_feature 1..22: note = chemically synthesized
  source 1..22: mol_type = other DNA
tccctcctccctctcccgctct

SEQ ID NO: 71078 - DNA, 22 bp, synthetic construct
  misc_feature 1..22: note = chemically synthesized
  source 1..22: mol_type = other DNA
ccctcctccctctcccgctctc

SEQ ID NO: 71079 - DNA, 22 bp, synthetic construct
  misc_feature 1..22: note = chemically synthesized
  source 1..22: mol_type = other DNA
cctcctccctctcccgctctcc

SEQ ID NO: 71080 - DNA, 22 bp, synthetic construct
  misc_feature 1..22: note = chemically synthesized
  source 1..22: mol_type = other DNA
ctccctctcccgctctcctcaa

SEQ ID NO: 71081 - DNA, 22 bp, synthetic construct
  misc_feature 1..22: note = chemically synthesized
  source 1..22: mol_type = other DNA
cctctcccgctctcctcaacca

SEQ ID NO: 71082 - DNA, 22 bp, synthetic construct
  misc_feature 1..22: note = chemically synthesized
  source 1..22: mol_type = other DNA
tcccgctctcctcaaccaaagg

SEQ ID NO: 71083 - DNA, 22 bp, synthetic construct
  misc_feature 1..22: note = chemically synthesized
  source 1..22: mol_type = other DNA
ccgctctcctcaaccaaaggac

SEQ ID NO: 71084 - DNA, 22 bp, synthetic construct
  misc_feature 1..22: note = chemically synthesized
  source 1..22: mol_type = other DNA
tcctcaaccaaaggactgtttc

SEQ ID NO: 71085 - DNA, 22 bp, synthetic construct
  misc_feature 1..22: note = chemically synthesized
  source 1..22: mol_type = other DNA
ctcaaccaaaggactgtttctt

SEQ ID NO: 71086 - DNA, 22 bp, synthetic construct
  misc_feature 1..22: note = chemically synthesized
  source 1..22: mol_type = other DNA
aaccaaaggactgtttcttact

SEQ ID NO: 71087 - DNA, 22 bp, synthetic construct
  misc_feature 1..22: note = chemically synthesized
  source 1..22: mol_type = other DNA
tttcttactaagttttctcagt

SEQ ID NO: 71088 - DNA, 22 bp, synthetic construct
  misc_feature 1..22: note = chemically synthesized
  source 1..22: mol_type = other DNA
cttactaagttttctcagtcat

SEQ ID NO: 71089 - DNA, 22 bp, synthetic construct
  misc_feature 1..22: note = chemically synthesized
  source 1..22: mol_type = other DNA
ttactaagttttctcagtcata

SEQ ID NO: 71090 - DNA, 22 bp, synthetic construct
  misc_feature 1..22: note = chemically synthesized
  source 1..22: mol_type = other DNA
actaagttttctcagtcataag

SEQ ID NO: 71091 - DNA, 22 bp, synthetic construct
  misc_feature 1..22: note = chemically synthesized
  source 1..22: mol_type = other DNA
ctaagttttctcagtcataagg

SEQ ID NO: 71092 - DNA, 22 bp, synthetic construct
  misc_feature 1..22: note = chemically synthesized
  source 1..22: mol_type = other DNA
agttttctcagtcataagggca

SEQ ID NO: 71093 - DNA, 22 bp, synthetic construct
  misc_feature 1..22: note = chemically synthesized
  source 1..22: mol_type = other DNA
tctcagtcataagggcaagtgt

SEQ ID NO: 71094 - DNA, 22 bp, synthetic construct
  misc_feature 1..22: note = chemically synthesized
  source 1..22: mol_type = other DNA
ctcagtcataagggcaagtgtt

SEQ ID NO: 71095 - DNA, 22 bp, synthetic construct
  misc_feature 1..22: note = chemically synthesized
  source 1..22: mol_type = other DNA
tcagtcataagggcaagtgttt

SEQ ID NO: 71096 - DNA, 22 bp, synthetic construct
  misc_feature 1..22: note = chemically synthesized
  source 1..22: mol_type = other DNA
agtcataagggcaagtgtttcc

SEQ ID NO: 71097 - DNA, 22 bp, synthetic construct
  misc_feature 1..22: note = chemically synthesized
  source 1..22: mol_type = other DNA
ccttccaggtgtgtcccgagtt

SEQ ID NO: 71098 - DNA, 22 bp, synthetic construct
  misc_feature 1..22: note = chemically synthesized
  source 1..22: mol_type = other DNA
cttccaggtgtgtcccgagttt

SEQ ID NO: 71099 - DNA, 22 bp, synthetic construct
  misc_feature 1..22: note = chemically synthesized
  source 1..22: mol_type = other DNA
ccaggtgtgtcccgagtttatt

SEQ ID NO: 71100 - DNA, 22 bp, synthetic construct
  misc_feature 1..22: note = chemically synthesized
  source 1..22: mol_type = other DNA
caggtgtgtcccgagtttatta

SEQ ID NO: 71101 - DNA, 22 bp, synthetic construct
  misc_feature 1..22: note = chemically synthesized
  source 1..22: mol_type = other DNA
attaggactatcatacaattgg

SEQ ID NO: 71102 - DNA, 22 bp, synthetic construct
  misc_feature 1..22: note = chemically synthesized
  source 1..22: mol_type = other DNA
ttaggactatcatacaattggg

SEQ ID NO: 71103 - DNA, 22 bp, synthetic construct
  misc_feature 1..22: note = chemically synthesized
  source 1..22: mol_type = other DNA
ggactatcatacaattgggcag

SEQ ID NO: 71104 - DNA, 22 bp, synthetic construct
  misc_feature 1..22: note = chemically synthesized
  source 1..22: mol_type = other DNA
tcatacaattgggcaggggtgg

SEQ ID NO: 71105 - DNA, 22 bp, synthetic construct
  misc_feature 1..22: note = chemically synthesized
  source 1..22: mol_type = other DNA
ggcaggggtggggggacctggg

SEQ ID NO: 71106 - DNA, 22 bp, synthetic construct
  misc_feature 1..22: note = chemically synthesized
  source 1..22: mol_type = other DNA
ggtcctccttggggggacggaa

SEQ ID NO: 71107 - DNA, 22 bp, synthetic construct
  misc_feature 1..22: note = chemically synthesized
  source 1..22: mol_type = other DNA
cttggggggacggaagggaggg

SEQ ID NO: 71108 - DNA, 22 bp, synthetic construct
  misc_feature 1..22: note = chemically synthesized
  source 1..22: mol_type = other DNA
ggggggacggaagggagggagg

SEQ ID NO: 71109 - DNA, 22 bp, synthetic construct
  misc_feature 1..22: note = chemically synthesized
  source 1..22: mol_type = other DNA
gggggacggaagggagggaggc

SEQ ID NO: 71110 - DNA, 22 bp, synthetic construct
  misc_feature 1..22: note = chemically synthesized
  source 1..22: mol_type = other DNA
agaggtcagagatacttgggga

SEQ ID NO: 71111 - DNA, 22 bp, synthetic construct
  misc_feature 1..22: note = chemically synthesized
  source 1..22: mol_type = other DNA
ggggaggggaggctgagtttga

SEQ ID NO: 71112 - DNA, 22 bp, synthetic construct
  misc_feature 1..22: note = chemically synthesized
  source 1..22: mol_type = other DNA
gggaggggaggctgagtttgaa

SEQ ID NO: 71113 - DNA, 22 bp, synthetic construct
  misc_feature 1..22: note = chemically synthesized
  source 1..22: mol_type = other DNA
agtttgaaatcatgcttaagat

SEQ ID NO: 71114 - DNA, 22 bp, synthetic construct
  misc_feature 1..22: note = chemically synthesized
  source 1..22: mol_type = other DNA
gaaatcatgcttaagatgccag

SEQ ID NO: 71115 - DNA, 22 bp, synthetic construct
  misc_feature 1..22: note = chemically synthesized
  source 1..22: mol_type = other DNA
aaatcatgcttaagatgccagt

SEQ ID NO: 71116 - DNA, 22 bp, synthetic construct
  misc_feature 1..22: note = chemically synthesized
  source 1..22: mol_type = other DNA
aagatgccagtggctcgacctg

SEQ ID NO: 71117 - DNA, 22 bp, synthetic construct
  misc_feature 1..22: note = chemically synthesized
  source 1..22: mol_type = other DNA
agatgccagtggctcgacctgt

SEQ ID NO: 71118 - DNA, 22 bp, synthetic construct
  misc_feature 1..22: note = chemically synthesized
  source 1..22: mol_type = other DNA
gacctgtggttggtttaagttc

SEQ ID NO: 71119 - DNA, 22 bp, synthetic construct
  misc_feature 1..22: note = chemically synthesized
  source 1..22: mol_type = other DNA
tggttggtttaagttctaattt

SEQ ID NO: 71120 - DNA, 22 bp, synthetic construct
  misc_feature 1..22: note = chemically synthesized
  source 1..22: mol_type = other DNA
gtttaagttctaatttttaaaa

SEQ ID NO: 71121 - DNA, 22 bp, synthetic construct
  misc_feature 1..22: note = chemically synthesized
  source 1..22: mol_type = other DNA
aagttctaatttttaaaaagct

SEQ ID NO: 71122 - DNA, 22 bp, synthetic construct
  misc_feature 1..22: note = chemically synthesized
  source 1..22: mol_type = other DNA
agttctaatttttaaaaagcta

SEQ ID NO: 71123 - DNA, 22 bp, synthetic construct
  misc_feature 1..22: note = chemically synthesized
  source 1..22: mol_type = other DNA
taatttttaaaaagctagttag

SEQ ID NO: 71124 - DNA, 22 bp, synthetic construct
  misc_feature 1..22: note = chemically synthesized
  source 1..22: mol_type = other DNA
atttttaaaaagctagttagag

SEQ ID NO: 71125 - DNA, 22 bp, synthetic construct
  misc_feature 1..22: note = chemically synthesized
  source 1..22: mol_type = other DNA
ttaaaaagctagttagagaaca

SEQ ID NO: 71126 - DNA, 22 bp, synthetic construct
  misc_feature 1..22: note = chemically synthesized
  source 1..22: mol_type = other DNA
taaaaagctagttagagaacag

SEQ ID NO: 71127 - DNA, 22 bp, synthetic construct
  misc_feature 1..22: note = chemically synthesized
  source 1..22: mol_type = other DNA
aaaaagctagttagagaacaga

SEQ ID NO: 71128 - DNA, 22 bp, synthetic construct
  misc_feature 1..22: note = chemically synthesized
  source 1..22: mol_type = other DNA
aaaagctagttagagaacagaa

SEQ ID NO: 71129 - DNA, 22 bp, synthetic construct
  misc_feature 1..22: note = chemically synthesized
  source 1..22: mol_type = other DNA
gttagagaacagaaaatcattg

SEQ ID NO: 71130 - DNA, 22 bp, synthetic construct
  misc_feature 1..22: note = chemically synthesized
  source 1..22: mol_type = other DNA
gagaacagaaaatcattgggcc

SEQ ID NO: 71131 - DNA, 22 bp, synthetic construct
  misc_feature 1..22: note = chemically synthesized
  source 1..22: mol_type = other DNA
ggccaagtcacacctgtacttt

SEQ ID NO: 71132 - DNA, 22 bp, synthetic construct
  misc_feature 1..22: note = chemically synthesized
  source 1..22: mol_type = other DNA
tactttttttttccccctcctc

SEQ ID NO: 71133 - DNA, 22 bp, synthetic construct
  misc_feature 1..22: note = chemically synthesized
  source 1..22: mol_type = other DNA
tttttttccccctcctctgtct

SEQ ID NO: 71134 - DNA, 22 bp, synthetic construct
  misc_feature 1..22: note = chemically synthesized
  source 1..22: mol_type = other DNA
ttttttccccctcctctgtctc

SEQ ID NO: 71135 - DNA, 22 bp, synthetic construct
  misc_feature 1..22: note = chemically synthesized
  source 1..22: mol_type = other DNA
tttttccccctcctctgtctcc

SEQ ID NO: 71136 - DNA, 22 bp, synthetic construct
  misc_feature 1..22: note = chemically synthesized
  source 1..22: mol_type = other DNA
ttttccccctcctctgtctcca

SEQ ID NO: 71137 - DNA, 22 bp, synthetic construct
  misc_feature 1..22: note = chemically synthesized
  source 1..22: mol_type = other DNA
tttccccctcctctgtctccaa

SEQ ID NO: 71138 - DNA, 22 bp, synthetic construct
  misc_feature 1..22: note = chemically synthesized
  source 1..22: mol_type = other DNA
ttccccctcctctgtctccaac

SEQ ID NO: 71139 - DNA, 22 bp, synthetic construct
  misc_feature 1..22: note = chemically synthesized
  source 1..22: mol_type = other DNA
tccccctcctctgtctccaacc

SEQ ID NO: 71140 - DNA, 22 bp, synthetic construct
  misc_feature 1..22: note = chemically synthesized
  source 1..22: mol_type = other DNA
ccccctcctctgtctccaacct

SEQ ID NO: 71141 - DNA, 22 bp, synthetic construct
  misc_feature 1..22: note = chemically synthesized
  source 1..22: mol_type = other DNA
cccctcctctgtctccaacctc

SEQ ID NO: 71142 - DNA, 22 bp, synthetic construct
  misc_feature 1..22: note = chemically synthesized
  source 1..22: mol_type = other DNA
ctctgtctccaacctctttcta

SEQ ID NO: 71143 - DNA, 22 bp, synthetic construct
  misc_feature 1..22: note = chemically synthesized
  source 1..22: mol_type = other DNA
tgtctccaacctctttctaggt

SEQ ID NO: 71144 - DNA, 22 bp, synthetic construct
  misc_feature 1..22: note = chemically synthesized
  source 1..22: mol_type = other DNA
tctccaacctctttctaggttc

SEQ ID NO: 71145 - DNA, 22 bp, synthetic construct
  misc_feature 1..22: note = chemically synthesized
  source 1..22: mol_type = other DNA
caacctctttctaggttcttca

SEQ ID NO: 71146 - DNA, 22 bp, synthetic construct
  misc_feature 1..22: note = chemically synthesized
  source 1..22: mol_type = other DNA
tttctaggttcttcacacaccc

SEQ ID NO: 71147 - DNA, 22 bp, synthetic construct
  misc_feature 1..22: note = chemically synthesized
  source 1..22: mol_type = other DNA
tctaggttcttcacacaccccc

SEQ ID NO: 71148 - DNA, 22 bp, synthetic construct
  misc_feature 1..22: note = chemically synthesized
  source 1..22: mol_type = other DNA
ctaggttcttcacacaccccca

SEQ ID NO: 71149 - DNA, 22 bp, synthetic construct
  misc_feature 1..22: note = chemically synthesized
  source 1..22: mol_type = other DNA
taggttcttcacacacccccat

SEQ ID NO: 71150 - DNA, 22 bp, synthetic construct
  misc_feature 1..22: note = chemically synthesized
  source 1..22: mol_type = other DNA
ggttcttcacacacccccattc

SEQ ID NO: 71151 - DNA, 22 bp, synthetic construct
  misc_feature 1..22: note = chemically synthesized
  source 1..22: mol_type = other DNA
ttcacacacccccattcggcgt

SEQ ID NO: 71152 - DNA, 22 bp, synthetic construct
  misc_feature 1..22: note = chemically synthesized
  source 1..22: mol_type = other DNA
cacacacccccattcggcgtag

SEQ ID NO: 71153 - DNA, 22 bp, synthetic construct
  misc_feature 1..22: note = chemically synthesized
  source 1..22: mol_type = other DNA
acacacccccattcggcgtagt

SEQ ID NO: 71154 - DNA, 22 bp, synthetic construct
  misc_feature 1..22: note = chemically synthesized
  source 1..22: mol_type = other DNA
ggcgtagtacccagagagctca

SEQ ID NO: 71155 - DNA, 22 bp, synthetic construct
  misc_feature 1..22: note = chemically synthesized
  source 1..22: mol_type = other DNA
aagatgtgtggcagttttcgga

SEQ ID NO: 71156 - DNA, 22 bp, synthetic construct
  misc_feature 1..22: note = chemically synthesized
  source 1..22: mol_type = other DNA
tcggatggaagctcgagagccc

SEQ ID NO: 71157 - DNA, 22 bp, synthetic construct
  misc_feature 1..22: note = chemically synthesized
  source 1..22: mol_type = other DNA
cggatggaagctcgagagccct

SEQ ID NO: 71158 - DNA, 22 bp, synthetic construct
  misc_feature 1..22: note = chemically synthesized
  source 1..22: mol_type = other DNA
ggatggaagctcgagagccctt

SEQ ID NO: 71159 - DNA, 22 bp, synthetic construct
  misc_feature 1..22: note = chemically synthesized
  source 1..22: mol_type = other DNA
gagagcccttaagttctgagaa

SEQ ID NO: 71160 - DNA, 22 bp, synthetic construct
  misc_feature 1..22: note = chemically synthesized
  source 1..22: mol_type = other DNA
aagttctgagaaaatttgaagc

SEQ ID NO: 71161 - DNA, 22 bp, synthetic construct
  misc_feature 1..22: note = chemically synthesized
  source 1..22: mol_type = other DNA
agttctgagaaaatttgaagcc

SEQ ID NO: 71162 - DNA, 22 bp, synthetic construct
  misc_feature 1..22: note = chemically synthesized
  source 1..22: mol_type = other DNA
tgagaaaatttgaagcccccag

SEQ ID NO: 71163 - DNA, 22 bp, synthetic construct
  misc_feature 1..22: note = chemically synthesized
  source 1..22: mol_type = other DNA
agaaaatttgaagcccccaggg

SEQ ID NO: 71164 - DNA, 22 bp, synthetic construct
  misc_feature 1..22: note = chemically synthesized
  source 1..22: mol_type = other DNA
gaagcccccaggggtggggtgg

SEQ ID NO: 71165 - DNA, 22 bp, synthetic construct
  misc_feature 1..22: note = chemically synthesized
  source 1..22: mol_type = other DNA
aagcccccaggggtggggtgga

SEQ ID NO: 71166 - DNA, 22 bp, synthetic construct
  misc_feature 1..22: note = chemically synthesized
  source 1..22: mol_type = other DNA
tcatcctgctagtttgtgatgt

SEQ ID NO: 71167 - DNA, 22 bp, synthetic construct
  misc_feature 1..22: note = chemically synthesized
  source 1..22: mol_type = other DNA
ctagtttgtgatgttttctgac

SEQ ID NO: 71168 - DNA, 22 bp, synthetic construct
  misc_feature 1..22: note = chemically synthesized
  source 1..22: mol_type = other DNA
gtttgtgatgttttctgacagt

SEQ ID NO: 71169 - DNA, 22 bp, synthetic construct
  misc_feature 1..22: note = chemically synthesized
  source 1..22: mol_type = other DNA
gtgatgttttctgacagtagcc

SEQ ID NO: 71170 - DNA, 22 bp, synthetic construct
  misc_feature 1..22: note = chemically synthesized
  source 1..22: mol_type = other DNA
tgatgttttctgacagtagcct

SEQ ID NO: 71171 - DNA, 22 bp, synthetic construct
  misc_feature 1..22: note = chemically synthesized
  source 1..22: mol_type = other DNA
tctgacagtagcctccaagaag

SEQ ID NO: 71172 - DNA, 22 bp, synthetic construct
  misc_feature 1..22: note = chemically synthesized
  source 1..22: mol_type = other DNA
ctgacagtagcctccaagaagc

SEQ ID NO: 71173 - DNA, 22 bp, synthetic construct
  misc_feature 1..22: note = chemically synthesized
  source 1..22: mol_type = other DNA
tgacagtagcctccaagaagcc

SEQ ID NO: 71174 - DNA, 22 bp, synthetic construct
  misc_feature 1..22: note = chemically synthesized
  source 1..22: mol_type = other DNA
acagtagcctccaagaagccgt

SEQ ID NO: 71175 - DNA, 22 bp, synthetic construct
  misc_feature 1..22: note = chemically synthesized
  source 1..22: mol_type = other DNA
caagaagccgttgtgcgaagac

SEQ ID NO: 71176 - DNA, 22 bp, synthetic construct
  misc_feature 1..22: note = chemically synthesized
  source 1..22: mol_type = other DNA
tgcgaagacagagtcctgcaga

SEQ ID NO: 71177 - DNA, 22 bp, synthetic construct
  misc_feature 1..22: note = chemically synthesized
  source 1..22: mol_type = other DNA
cagagtccttccagcctaggcc

SEQ ID NO: 71178 - DNA, 22 bp, synthetic construct
  misc_feature 1..22: note = chemically synthesized
  source 1..22: mol_type = other DNA
ccagcctaggcctgcagcgcca

SEQ ID NO: 71179 - DNA, 22 bp, synthetic construct
  misc_feature 1..22: note = chemically synthesized
  source 1..22: mol_type = other DNA
cagcctaggcctgcagcgccat

SEQ ID NO: 71180 - DNA, 22 bp, synthetic construct
  misc_feature 1..22: note = chemically synthesized
  source 1..22: mol_type = other DNA
ggcctgcagcgccattttattt

SEQ ID NO: 71181 - DNA, 22 bp, synthetic construct
  misc_feature 1..22: note = chemically synthesized
  source 1..22: mol_type = other DNA
cagcgccattttatttatattt

SEQ ID NO: 71182 - DNA, 22 bp, synthetic construct
  misc_feature 1..22: note = chemically synthesized
  source 1..22: mol_type = other DNA
tatttatattttttaataaaaa

SEQ ID NO: 71183 - DNA, 22 bp, synthetic construct
  misc_feature 1..22: note = chemically synthesized
  source 1..22: mol_type = other DNA
atttatattttttaataaaaag

SEQ ID NO: 71184 - DNA, 22 bp, synthetic construct
  misc_feature 1..22: note = chemically synthesized
  source 1..22: mol_type = other DNA
tttatattttttaataaaaagt

SEQ ID NO: 71185 - DNA, 22 bp, synthetic construct
  misc_feature 1..22: note = chemically synthesized
  source 1..22: mol_type = other DNA
atattttttaataaaaagtaaa

SEQ ID NO: 71186 - DNA, 22 bp, synthetic construct
  misc_feature 1..22: note = chemically synthesized
  source 1..22: mol_type = other DNA
tattttttaataaaaagtaaaa

SEQ ID NO: 71187 - DNA, 22 bp, synthetic construct
  misc_feature 1..22: note = chemically synthesized
  source 1..22: mol_type = other DNA
tttaataaaaagtaaaaacaaa

SEQ ID NO: 71188 - DNA, 22 bp, synthetic construct
  misc_feature 1..22: note = chemically synthesized
  source 1..22: mol_type = other DNA
ttaataaaaagtaaaaacaaaa

SEQ ID NO: 71189 - DNA, 22 bp, synthetic construct
  misc_feature 1..22: note = chemically synthesized
  source 1..22: mol_type = other DNA
taataaaaagtaaaaacaaaaa

SEQ ID NO: 71190 - DNA, 22 bp, synthetic construct
  misc_feature 1..22: note = chemically synthesized
  source 1..22: mol_type = other DNA
aataaaaagtaaaaacaaaaaa

SEQ ID NO: 71191 - DNA, 22 bp, synthetic construct
  misc_feature 1..22: note = chemically synthesized
  source 1..22: mol_type = other DNA
ataaaaagtaaaaacaaaaaaa

SEQ ID NO: 71192 - DNA, 22 bp, synthetic construct
  misc_feature 1..22: note = chemically synthesized
  source 1..22: mol_type = other DNA
gaacagtgaatcagtcccatag

SEQ ID NO: 71193 - DNA, 22 bp, synthetic construct
  misc_feature 1..22: note = chemically synthesized
  source 1..22: mol_type = other DNA
tcatgagtgatgccctggccct

SEQ ID NO: 71194 - DNA, 22 bp, synthetic construct
  misc_feature 1..22: note = chemically synthesized
  source 1..22: mol_type = other DNA
gcccttctgaaaccagccaacc

SEQ ID NO: 71195 - DNA, 22 bp, synthetic construct
  misc_feature 1..22: note = chemically synthesized
  source 1..22: mol_type = other DNA
ctgaaaccagccaacctaatta

SEQ ID NO: 71196 - DNA, 22 bp, synthetic construct
  misc_feature 1..22: note = chemically synthesized
  source 1..22: mol_type = other DNA
tgaaaccagccaacctaattac

SEQ ID NO: 71197 - DNA, 22 bp, synthetic construct
  misc_feature 1..22: note = chemically synthesized
  source 1..22: mol_type = other DNA
aaaccagccaacctaattacct

SEQ ID NO: 71198 - DNA, 22 bp, synthetic construct
  misc_feature 1..22: note = chemically synthesized
  source 1..22: mol_type = other DNA
attacctgtattgtggaaatgc

SEQ ID NO: 71199 - DNA, 22 bp, synthetic construct
  misc_feature 1..22: note = chemically synthesized
  source 1..22: mol_type = other DNA
cctgtattgtggaaatgcgcat

SEQ ID NO: 71200 - DNA, 22 bp, synthetic construct
  misc_feature 1..22: note = chemically synthesized
  source 1..22: mol_type = other DNA
tattgtggaaatgcgcatgagt

SEQ ID NO: 71201 - DNA, 22 bp, synthetic construct
  misc_feature 1..22: note = chemically synthesized
  source 1..22: mol_type = other DNA
tggaaatgcgcatgagtcccca

SEQ ID NO: 71202 - DNA, 22 bp, synthetic construct
  misc_feature 1..22: note = chemically synthesized
  source 1..22: mol_type = other DNA
gtttctatacattctatgttgt

SEQ ID NO: 71203 - DNA, 22 bp, synthetic construct
  misc_feature 1..22: note = chemically synthesized
  source 1..22: mol_type = other DNA
tttctatacattctatgttgtc

SEQ ID NO: 71204 - DNA, 22 bp, synthetic construct
  misc_feature 1..22: note = chemically synthesized
  source 1..22: mol_type = other DNA
ctatacattctatgttgtcttt

SEQ ID NO: 71205 - DNA, 22 bp, synthetic construct
  misc_feature 1..22: note = chemically synthesized
  source 1..22: mol_type = other DNA
tatacattctatgttgtctttt

SEQ ID NO: 71206 - DNA, 22 bp, synthetic construct
  misc_feature 1..22: note = chemically synthesized
  source 1..22: mol_type = other DNA
tacattctatgttgtcttttaa

SEQ ID NO: 71207 - DNA, 22 bp, synthetic construct
  misc_feature 1..22: note = chemically synthesized
  source 1..22: mol_type = other DNA
tatgttgtcttttaaaaagtgt

SEQ ID NO: 71208 - DNA, 22 bp, synthetic construct
  misc_feature 1..22: note = chemically synthesized
  source 1..22: mol_type = other DNA
tgttgtcttttaaaaagtgtgc

SEQ ID NO: 71209 - DNA, 22 bp, synthetic construct
  misc_feature 1..22: note = chemically synthesized
  source 1..22: mol_type = other DNA
tcttttaaaaagtgtgcttaac

SEQ ID NO: 71210 - DNA, 22 bp, synthetic construct
  misc_feature 1..22: note = chemically synthesized
  source 1..22: mol_type = other DNA
ttaaaaagtgtgcttaacattg

SEQ ID NO: 71211 - DNA, 22 bp, synthetic construct
  misc_feature 1..22: note = chemically synthesized
  source 1..22: mol_type = other DNA
taaaaagtgtgcttaacattga

SEQ ID NO: 71212 - DNA, 22 bp, synthetic construct
  misc_feature 1..22: note = chemically synthesized
  source 1..22: mol_type = other DNA
aaaaagtgtgcttaacattgac

SEQ ID NO: 71213 - DNA, 22 bp, synthetic construct
  misc_feature 1..22: note = chemically synthesized
  source 1..22: mol_type = other DNA
aaaagtgtgcttaacattgaca

SEQ ID NO: 71214 - DNA, 22 bp, synthetic construct
  misc_feature 1..22: note = chemically synthesized
  source 1..22: mol_type = other DNA
aacattgacacaataaatgttg

SEQ ID NO: 71215 - DNA, 22 bp, synthetic construct
  misc_feature 1..22: note = chemically synthesized
  source 1..22: mol_type = other DNA
acattgacacaataaatgttgg

SEQ ID NO: 71216 - DNA, 22 bp, synthetic construct
  misc_feature 1..22: note = chemically synthesized
  source 1..22: mol_type = other DNA
acacaataaatgttggagcttt

SEQ ID NO: 71217 - DNA, 22 bp, synthetic construct
  misc_feature 1..22: note = chemically synthesized
  source 1..22: mol_type = other DNA
gagctttaggtggtgtttgctt

SEQ ID NO: 71218 - DNA, 22 bp, synthetic construct
  misc_feature 1..22: note = chemically synthesized
  source 1..22: mol_type = other DNA
taggtggtgtttgcttgttctt

SEQ ID NO: 71219 - DNA, 22 bp, synthetic construct
  misc_feature 1..22: note = chemically synthesized
  source 1..22: mol_type = other DNA
aggtggtgtttgcttgttcttt

SEQ ID NO: 71220 - DNA, 22 bp, synthetic construct
  misc_feature 1..22: note = chemically synthesized
  source 1..22: mol_type = other DNA
ggtggtgtttgcttgttcttta

SEQ ID NO: 71221 - DNA, 22 bp, synthetic construct
  misc_feature 1..22: note = chemically synthesized
  source 1..22: mol_type = other DNA
gcttgttctttaatttttaatg

SEQ ID NO: 71222 - DNA, 22 bp, synthetic construct
  misc_feature 1..22: note = chemically synthesized
  source 1..22: mol_type = other DNA
cttgttctttaatttttaatgc

SEQ ID NO: 71223 - DNA, 22 bp, synthetic construct
  misc_feature 1..22: note = chemically synthesized
  source 1..22: mol_type = other DNA
gttctttaatttttaatgctta

SEQ ID NO: 71224 - DNA, 22 bp, synthetic construct
  misc_feature 1..22: note = chemically synthesized
  source 1..22: mol_type = other DNA
ttctttaatttttaatgcttat

SEQ ID NO: 71225 - DNA, 22 bp, synthetic construct
  misc_feature 1..22: note = chemically synthesized
  source 1..22: mol_type = other DNA
tttaatttttaatgcttataag

SEQ ID NO: 71226 - DNA, 22 bp, synthetic construct
  misc_feature 1..22: note = chemically synthesized
  source 1..22: mol_type = other DNA
taatttttaatgcttataagac

SEQ ID NO: 71227 - DNA, 22 bp, synthetic construct
  misc_feature 1..22: note = chemically synthesized
  source 1..22: mol_type = other DNA
aatttttaatgcttataagaca

SEQ ID NO: 71228 - DNA, 22 bp, synthetic construct
  misc_feature 1..22: note = chemically synthesized
  source 1..22: mol_type = other DNA
atttttaatgcttataagacaa

SEQ ID NO: 71229 - DNA, 22 bp, synthetic construct
  misc_feature 1..22: note = chemically synthesized
  source 1..22: mol_type = other DNA
ttaatgcttataagacaatgag

SEQ ID NO: 71230 - DNA, 22 bp, synthetic construct
  misc_feature 1..22: note = chemically synthesized
  source 1..22: mol_type = other DNA
taatgcttataagacaatgagg

SEQ ID NO: 71231 - DNA, 22 bp, synthetic construct
  misc_feature 1..22: note = chemically synthesized
  source 1..22: mol_type = other DNA
aatgcttataagacaatgaggc

SEQ ID NO: 71232 - DNA, 22 bp, synthetic construct
  misc_feature 1..22: note = chemically synthesized
  source 1..22: mol_type = other DNA
atgcttataagacaatgaggct

SEQ ID NO: 71233 - DNA, 22 bp, synthetic construct
  misc_feature 1..22: note = chemically synthesized
  source 1..22: mol_type = other DNA
ataagacaatgaggctgcttat

SEQ ID NO: 71234 - DNA, 22 bp, synthetic construct
  misc_feature 1..22: note = chemically synthesized
  source 1..22: mol_type = other DNA
taagacaatgaggctgcttatg

SEQ ID NO: 71235 - DNA, 22 bp, synthetic construct
  misc_feature 1..22: note = chemically synthesized
  source 1..22: mol_type = other DNA
cttatgattttgtacttctgta

SEQ ID NO: 71236 - DNA, 22 bp, synthetic construct
  misc_feature 1..22: note = chemically synthesized
  source 1..22: mol_type = other DNA
atgattttgtacttctgtacct

SEQ ID NO: 71237 - DNA, 22 bp, synthetic construct
  misc_feature 1..22: note = chemically synthesized
  source 1..22: mol_type = other DNA
tgattttgtacttctgtacctg

SEQ ID NO: 71238 - DNA, 22 bp, synthetic construct
  misc_feature 1..22: note = chemically synthesized
  source 1..22: mol_type = other DNA
tgtacttctgtacctgtttcct

SEQ ID NO: 71239 - DNA, 22 bp, synthetic construct
  misc_feature 1..22: note = chemically synthesized
  source 1..22: mol_type = other DNA
gtacttctgtacctgtttccta

SEQ ID NO: 71240 - DNA, 22 bp, synthetic construct
  misc_feature 1..22: note = chemically synthesized
  source 1..22: mol_type = other DNA
tacttctgtacctgtttcctac

SEQ ID NO: 71241 - DNA, 22 bp, synthetic construct
  misc_feature 1..22: note = chemically synthesized
  source 1..22: mol_type = other DNA
ctgtacctgtttcctacagaca

SEQ ID NO: 71242 - DNA, 22 bp, synthetic construct
  misc_feature 1..22: note = chemically synthesized
  source 1..22: mol_type = other DNA
tgtacctgtttcctacagacac

SEQ ID NO: 71243 - DNA, 22 bp, synthetic construct
  misc_feature 1..22: note = chemically synthesized
  source 1..22: mol_type = other DNA
tacctgtttcctacagacaccc

SEQ ID NO: 71244 - DNA, 22 bp, synthetic construct
  misc_feature 1..22: note = chemically synthesized
  source 1..22: mol_type = other DNA
tttcctacagacacccatcggg

SEQ ID NO: 71245 - DNA, 22 bp, synthetic construct
  misc_feature 1..22: note = chemically synthesized
  source 1..22: mol_type = other DNA
cctacagacacccatcgggtgg

SEQ ID NO: 71246 - DNA, 22 bp, synthetic construct
  misc_feature 1..22: note = chemically synthesized
  source 1..22: mol_type = other DNA
ctacagacacccatcgggtggg

SEQ ID NO: 71247 - DNA, 22 bp, synthetic construct
  misc_feature 1..22: note = chemically synthesized
  source 1..22: mol_type = other DNA
cagacacccatcgggtgggtag

SEQ ID NO: 71248 - DNA, 22 bp, synthetic construct
  misc_feature 1..22: note = chemically synthesized
  source 1..22: mol_type = other DNA
gagaaatgggcaggagatgtag

SEQ ID NO: 71249 - DNA, 22 bp, synthetic construct
  misc_feature 1..22: note = chemically synthesized
  source 1..22: mol_type = other DNA
agaaatgggcaggagatgtagg

SEQ ID NO: 71250 - DNA, 22 bp, synthetic construct
  misc_feature 1..22: note = chemically synthesized
  source 1..22: mol_type = other DNA
ggttaccgcttatcagatggca

SEQ ID NO: 71251 - DNA, 22 bp, synthetic construct
  misc_feature 1..22: note = chemically synthesized
  source 1..22: mol_type = other DNA
ccgcttatcagatggcataaat

SEQ ID NO: 71252 - DNA, 22 bp, synthetic construct
  misc_feature 1..22: note = chemically synthesized
  source 1..22: mol_type = other DNA
atcagatggcataaattttcaa

SEQ ID NO: 71253 - DNA, 22 bp, synthetic construct
  misc_feature 1..22: note = chemically synthesized
  source 1..22: mol_type = other DNA
tcagatggcataaattttcaag

SEQ ID NO: 71254 - DNA, 22 bp, synthetic construct
  misc_feature 1..22: note = chemically synthesized
  source 1..22: mol_type = other DNA
tcaaggagaatcaaaatgcaaa

SEQ ID NO: 71255 - DNA, 22 bp, synthetic construct
  misc_feature 1..22: note = chemically synthesized
  source 1..22: mol_type = other DNA
caaggagaatcaaaatgcaaaa

SEQ ID NO: 71256 - DNA, 22 bp, synthetic construct
  misc_feature 1..22: note = chemically synthesized
  source 1..22: mol_type = other DNA
aaggagaatcaaaatgcaaaac

SEQ ID NO: 71257 - DNA, 22 bp, synthetic construct
  misc_feature 1..22: note = chemically synthesized
  source 1..22: mol_type = other DNA
gggaataaatcatagcaatatc

SEQ ID NO: 71258 - DNA, 22 bp, synthetic construct
  misc_feature 1..22: note = chemically synthesized
  source 1..22: mol_type = other DNA
ggaataaatcatagcaatatca

SEQ ID NO: 71259 - DNA, 22 bp, synthetic construct
  misc_feature 1..22: note = chemically synthesized
  source 1..22: mol_type = other DNA
atgtagtagtaatattgctgtt

SEQ ID NO: 71260 - DNA, 22 bp, synthetic construct
  misc_feature 1..22: note = chemically synthesized
  source 1..22: mol_type = other DNA
ctgtttattaatgctgaagtgt

SEQ ID NO: 71261 - DNA, 22 bp, synthetic construct
  misc_feature 1..22: note = chemically synthesized
  source 1..22: mol_type = other DNA
tttattaatgctgaagtgtggt

SEQ ID NO: 71262 - DNA, 22 bp, synthetic construct
  misc_feature 1..22: note = chemically synthesized
  source 1..22: mol_type = other DNA
attaatgctgaagtgtggtttt

SEQ ID NO: 71263 - DNA, 22 bp, synthetic construct
  misc_feature 1..22: note = chemically synthesized
  source 1..22: mol_type = other DNA
ttaatgctgaagtgtggttttc

SEQ ID NO: 71264 - DNA, 22 bp, synthetic construct
  misc_feature 1..22: note = chemically synthesized
  source 1..22: mol_type = other DNA
atgctgaagtgtggttttccta

SEQ ID NO: 71265 - DNA, 22 bp, synthetic construct
  misc_feature 1..22: note = chemically synthesized
  source 1..22: mol_type = other DNA
aagtgtggttttcctaactgtc

SEQ ID NO: 71266 - DNA, 22 bp, synthetic construct
  misc_feature 1..22: note = chemically synthesized
  source 1..22: mol_type = other DNA
tcctaactgtctgacttataat

SEQ ID NO: 71267 - DNA, 22 bp, synthetic construct
  misc_feature 1..22: note = chemically synthesized
  source 1..22: mol_type = other DNA
cctaactgtctgacttataatt

SEQ ID NO: 71268 - DNA, 22 bp, synthetic construct
  misc_feature 1..22: note = chemically synthesized
  source 1..22: mol_type = other DNA
ctaactgtctgacttataattt

SEQ ID NO: 71269 - DNA, 22 bp, synthetic construct
  misc_feature 1..22: note = chemically synthesized
  source 1..22: mol_type = other DNA
actgtctgacttataatttgca

SEQ ID NO: 71270 - DNA, 22 bp, synthetic construct
  misc_feature 1..22: note = chemically synthesized
  source 1..22: mol_type = other DNA
tctgacttataatttgcatacc

SEQ ID NO: 71271 - DNA, 22 bp, synthetic construct
  misc_feature 1..22: note = chemically synthesized
  source 1..22: mol_type = other DNA
acttataatttgcataccatta

SEQ ID NO: 71272 - DNA, 22 bp, synthetic construct
  misc_feature 1..22: note = chemically synthesized
  source 1..22: mol_type = other DNA
ataatttgcataccattaaata

SEQ ID NO: 71273 - DNA, 22 bp, synthetic construct
  misc_feature 1..22: note = chemically synthesized
  source 1..22: mol_type = other DNA
taatttgcataccattaaataa

SEQ ID NO: 71274 - DNA, 22 bp, synthetic construct
  misc_feature 1..22: note = chemically synthesized
  source 1..22: mol_type = other DNA
gcataccattaaataatgcata

SEQ ID NO: 71275 - DNA, 22 bp, synthetic construct
  misc_feature 1..22: note = chemically synthesized
  source 1..22: mol_type = other DNA
cataccattaaataatgcataa

SEQ ID NO: 71276 - DNA, 22 bp, synthetic construct
  misc_feature 1..22: note = chemically synthesized
  source 1..22: mol_type = other DNA
aataatgcataatatggcacgc

SEQ ID NO: 71277 - DNA, 22 bp, synthetic construct
  misc_feature 1..22: note = chemically synthesized
  source 1..22: mol_type = other DNA
tttttcaaatatatgcttttgg

SEQ ID NO: 71278 - DNA, 22 bp, synthetic construct
  misc_feature 1..22: note = chemically synthesized
  source 1..22: mol_type = other DNA
ttcaaatatatgcttttggtgg

SEQ ID NO: 71279 - DNA, 22 bp, synthetic construct
  misc_feature 1..22: note = chemically synthesized
  source 1..22: mol_type = other DNA
tcaaatatatgcttttggtggc

SEQ ID NO: 71280 - DNA, 22 bp, synthetic construct
  misc_feature 1..22: note = chemically synthesized
  source 1..22: mol_type = other DNA
caaatatatgcttttggtggct

SEQ ID NO: 71281 - DNA, 22 bp, synthetic construct
  misc_feature 1..22: note = chemically synthesized
  source 1..22: mol_type = other DNA
aaatatatgcttttggtggcta

SEQ ID NO: 71282 - DNA, 22 bp, synthetic construct
  misc_feature 1..22: note = chemically synthesized
  source 1..22: mol_type = other DNA
ttggtggctaccatgcaggatt

SEQ ID NO: 71283 - DNA, 22 bp, synthetic construct
  misc_feature 1..22: note = chemically synthesized
  source 1..22: mol_type = other DNA
tggtggctaccatgcaggattt

SEQ ID NO: 71284 - DNA, 22 bp, synthetic construct
  misc_feature 1..22: note = chemically synthesized
  source 1..22: mol_type = other DNA
ggtggctaccatgcaggatttg

SEQ ID NO: 71285 - DNA, 22 bp, synthetic construct
  misc_feature 1..22: note = chemically synthesized
  source 1..22: mol_type = other DNA
gtggctaccatgcaggatttga

SEQ ID NO: 71286 - DNA, 22 bp, synthetic construct
  misc_feature 1..22: note = chemically synthesized
  source 1..22: mol_type = other DNA
ccatgcaggatttgaatttgtc

SEQ ID NO: 71287 - DNA, 22 bp, synthetic construct
  misc_feature 1..22: note = chemically synthesized
  source 1..22: mol_type = other DNA
gaatttgtcttttaatttagct

SEQ ID NO: 71288 - DNA, 22 bp, synthetic construct
  misc_feature 1..22: note = chemically synthesized
  source 1..22: mol_type = other DNA
aatttgtcttttaatttagctt

SEQ ID NO: 71289 - DNA, 22 bp, synthetic construct
  misc_feature 1..22: note = chemically synthesized
  source 1..22: mol_type = other DNA
gtcttttaatttagcttaggaa

SEQ ID NO: 71290 - DNA, 22 bp, synthetic construct
  misc_feature 1..22: note = chemically synthesized
  source 1..22: mol_type = other DNA
tcttttaatttagcttaggaaa

SEQ ID NO: 71291 - DNA, 22 bp, synthetic construct
  misc_feature 1..22: note = chemically synthesized
  source 1..22: mol_type = other DNA
ttaatttagcttaggaaagaac

SEQ ID NO: 71292 - DNA, 22 bp, synthetic construct
  misc_feature 1..22: note = chemically synthesized
  source 1..22: mol_type = other DNA
taatttagcttaggaaagaaca

SEQ ID NO: 71293 - DNA, 22 bp, synthetic construct
  misc_feature 1..22: note = chemically synthesized
  source 1..22: mol_type = other DNA
aatttagcttaggaaagaacat

SEQ ID NO: 71294 - DNA, 22 bp, synthetic construct
  misc_feature 1..22: note = chemically synthesized
  source 1..22: mol_type = other DNA
atttagcttaggaaagaacatc

SEQ ID NO: 71295 - DNA, 22 bp, synthetic construct
  misc_feature 1..22: note = chemically synthesized
  source 1..22: mol_type = other DNA
agcttaggaaagaacatcactg

SEQ ID NO: 71296 - DNA, 22 bp, synthetic construct
  misc_feature 1..22: note = chemically synthesized
  source 1..22: mol_type = other DNA
gcttaggaaagaacatcactgg

SEQ ID NO: 71297 - DNA, 22 bp, synthetic construct
  misc_feature 1..22: note = chemically synthesized
  source 1..22: mol_type = other DNA
aggaaagaacatcactgggcga

SEQ ID NO: 71298 - DNA, 22 bp, synthetic construct
  misc_feature 1..22: note = chemically synthesized
  source 1..22: mol_type = other DNA
ggaaagaacatcactgggcgag

SEQ ID NO: 71299 - DNA, 22 bp, synthetic construct
  misc_feature 1..22: note = chemically synthesized
  source 1..22: mol_type = other DNA
ggcgagcggtaaatcctaaaga

SEQ ID NO: 71300 - DNA, 22 bp, synthetic construct
  misc_feature 1..22: note = chemically synthesized
  source 1..22: mol_type = other DNA
aagaaggtgataaatgtcagta

SEQ ID NO: 71301 - DNA, 22 bp, synthetic construct
  misc_feature 1..22: note = chemically synthesized
  source 1..22: mol_type = other DNA
cttattaaatattctaatttta

SEQ ID NO: 71302 - DNA, 22 bp, synthetic construct
  misc_feature 1..22: note = chemically synthesized
  source 1..22: mol_type = other DNA
ttattaaatattctaattttag

SEQ ID NO: 71303 - DNA, 22 bp, synthetic construct
  misc_feature 1..22: note = chemically synthesized
  source 1..22: mol_type = other DNA
attaaatattctaattttaggt

SEQ ID NO: 71304 - DNA, 22 bp, synthetic construct
  misc_feature 1..22: note = chemically synthesized
  source 1..22: mol_type = other DNA
ttaaatattctaattttaggtt

SEQ ID NO: 71305 - DNA, 22 bp, synthetic construct
  misc_feature 1..22: note = chemically synthesized
  source 1..22: mol_type = other DNA
aatattctaattttaggttccc

SEQ ID NO: 71306 - DNA, 22 bp, synthetic construct
  misc_feature 1..22: note = chemically synthesized
  source 1..22: mol_type = other DNA
taattttaggttcccaaacctt

SEQ ID NO: 71307 - DNA, 22 bp, synthetic construct
  misc_feature 1..22: note = chemically synthesized
  source 1..22: mol_type = other DNA
attttaggttcccaaaccttca

SEQ ID NO: 71308 - DNA, 22 bp, synthetic construct
  misc_feature 1..22: note = chemically synthesized
  source 1..22: mol_type = other DNA
taggttcccaaaccttcaggaa

SEQ ID NO: 71309 - DNA, 22 bp, synthetic construct
  misc_feature 1..22: note = chemically synthesized
  source 1..22: mol_type = other DNA
aggttcccaaaccttcaggaaa

SEQ ID NO: 71310 - DNA, 22 bp, synthetic construct
  misc_feature 1..22: note = chemically synthesized
  source 1..22: mol_type = other DNA
ggttcccaaaccttcaggaaat

SEQ ID NO: 71311 - DNA, 22 bp, synthetic construct
  misc_feature 1..22: note = chemically synthesized
  source 1..22: mol_type = other DNA
ccaaaccttcaggaaatatatc

SEQ ID NO: 71312 - DNA, 22 bp, synthetic construct
  misc_feature 1..22: note = chemically synthesized
  source 1..22: mol_type = other DNA
caggaaatatatcttaatgcag

SEQ ID NO: 71313 - DNA, 22 bp, synthetic construct
  misc_feature 1..22: note = chemically synthesized
  source 1..22: mol_type = other DNA
aggaaatatatcttaatgcaga

SEQ ID NO: 71314 - DNA, 22 bp, synthetic construct
  misc_feature 1..22: note = chemically synthesized
  source 1..22: mol_type = other DNA
aatgcagacaaacaaacataaa

SEQ ID NO: 71315 - DNA, 22 bp, synthetic construct
  misc_feature 1..22: note = chemically synthesized
  source 1..22: mol_type = other DNA
atgcagacaaacaaacataaaa

SEQ ID NO: 71316 - DNA, 22 bp, synthetic construct
  misc_feature 1..22: note = chemically synthesized
  source 1..22: mol_type = other DNA
ctttagtacttacatcaggaaa

SEQ ID NO: 71317 - DNA, 22 bp, synthetic construct
  misc_feature 1..22: note = chemically synthesized
  source 1..22: mol_type = other DNA
tttagtacttacatcaggaaat

SEQ ID NO: 71318 - DNA, 22 bp, synthetic construct
  misc_feature 1..22: note = chemically synthesized
  source 1..22: mol_type = other DNA
tagtacttacatcaggaaattt

SEQ ID NO: 71319 - DNA, 22 bp, synthetic construct
  misc_feature 1..22: note = chemically synthesized
  source 1..22: mol_type = other DNA
agtacttacatcaggaaatttg

SEQ ID NO: 71320 - DNA, 22 bp, synthetic construct
  misc_feature 1..22: note = chemically synthesized
  source 1..22: mol_type = other DNA
gtacttacatcaggaaatttgg

SEQ ID NO: 71321 - DNA, 22 bp, synthetic construct
  misc_feature 1..22: note = chemically synthesized
  source 1..22: mol_type = other DNA
acatcaggaaatttggggcaga

SEQ ID NO: 71322 - DNA, 22 bp, synthetic construct
  misc_feature 1..22: note = chemically synthesized
  source 1..22: mol_type = other DNA
catcaggaaatttggggcagat

SEQ ID NO: 71323 - DNA, 22 bp, synthetic construct
  misc_feature 1..22: note = chemically synthesized
  source 1..22: mol_type = other DNA
ggggcagattttagagggggga

SEQ ID NO: 71324 - DNA, 22 bp, synthetic construct
  misc_feature 1..22: note = chemically synthesized
  source 1..22: mol_type = other DNA
gggcagattttagaggggggaa

SEQ ID NO: 71325 - DNA, 22 bp, synthetic construct
  misc_feature 1..22: note = chemically synthesized
  source 1..22: mol_type = other DNA
tagaggggggaaattataggag

SEQ ID NO: 71326 - DNA, 22 bp, synthetic construct
  misc_feature 1..22: note = chemically synthesized
  source 1..22: mol_type = other DNA
agaggggggaaattataggagg

SEQ ID NO: 71327 - DNA, 22 bp, synthetic construct
  misc_feature 1..22: note = chemically synthesized
  source 1..22: mol_type = other DNA
gaggggggaaattataggagga

SEQ ID NO: 71328 - DNA, 22 bp, synthetic construct
  misc_feature 1..22: note = chemically synthesized
  source 1..22: mol_type = other DNA
taggaggaaagaagttcacatc

SEQ ID NO: 71329 - DNA, 22 bp, synthetic construct
  misc_feature 1..22: note = chemically synthesized
  source 1..22: mol_type = other DNA
acatcagaacagacaatcacag

SEQ ID NO: 71330 - DNA, 22 bp, synthetic construct
  misc_feature 1..22: note = chemically synthesized
  source 1..22: mol_type = other DNA
tattccttagaaattagtgcca

SEQ ID NO: 71331 - DNA, 22 bp, synthetic construct
  misc_feature 1..22: note = chemically synthesized
  source 1..22: mol_type = other DNA
ttccttagaaattagtgccaca

SEQ ID NO: 71332 - DNA, 22 bp, synthetic construct
  misc_feature 1..22: note = chemically synthesized
  source 1..22: mol_type = other DNA
cttagaaattagtgccacaaat

SEQ ID NO: 71333 - DNA, 22 bp, synthetic construct
  misc_feature 1..22: note = chemically synthesized
  source 1..22: mol_type = other DNA
agaaattagtgccacaaataag

SEQ ID NO: 71334 - DNA, 22 bp, synthetic construct
  misc_feature 1..22: note = chemically synthesized
  source 1..22: mol_type = other DNA
gaaattagtgccacaaataagt

SEQ ID NO: 71335 - DNA, 22 bp, synthetic construct
  misc_feature 1..22: note = chemically synthesized
  source 1..22: mol_type = other DNA
gtgccacaaataagttacatct

SEQ ID NO: 71336 - DNA, 22 bp, synthetic construct
  misc_feature 1..22: note = chemically synthesized
  source 1..22: mol_type = other DNA
catctacaaacaggtggtaaaa

SEQ ID NO: 71337 - DNA, 22 bp, synthetic construct
  misc_feature 1..22: note = chemically synthesized
  source 1..22: mol_type = other DNA
caaacaggtggtaaaaattctt

SEQ ID NO: 71338 - DNA, 22 bp, synthetic construct
  misc_feature 1..22: note = chemically synthesized
  source 1..22: mol_type = other DNA
tttctggcccagttaatttgca

SEQ ID NO: 71339 - DNA, 22 bp, synthetic construct
  misc_feature 1..22: note = chemically synthesized
  source 1..22: mol_type = other DNA
tctggcccagttaatttgcaca

SEQ ID NO: 71340 - DNA, 22 bp, synthetic construct
  misc_feature 1..22: note = chemically synthesized
  source 1..22: mol_type = other DNA
ctggcccagttaatttgcacag

SEQ ID NO: 71341 - DNA, 22 bp, synthetic construct
  misc_feature 1..22: note = chemically synthesized
  source 1..22: mol_type = other DNA
tggcccagttaatttgcacaga

SEQ ID NO: 71342 - DNA, 22 bp, synthetic construct
  misc_feature 1..22: note = chemically synthesized
  source 1..22: mol_type = other DNA
gcccagttaatttgcacagaac

SEQ ID NO: 71343 - DNA, 22 bp, synthetic construct
  misc_feature 1..22: note = chemically synthesized
  source 1..22: mol_type = other DNA
atttgcacagaacttttctcag

SEQ ID NO: 71344 - DNA, 22 bp, synthetic construct
  misc_feature 1..22: note = chemically synthesized
  source 1..22: mol_type = other DNA
gcacagaacttttctcagtttg

SEQ ID NO: 71345 - DNA, 22 bp, synthetic construct
  misc_feature 1..22: note = chemically synthesized
  source 1..22: mol_type = other DNA
cacagaacttttctcagtttgg

SEQ ID NO: 71346 - DNA, 22 bp, synthetic construct
  misc_feature 1..22: note = chemically synthesized
  source 1..22: mol_type = other DNA
ttctcagtttggtattttttac

SEQ ID NO: 71347 - DNA, 22 bp, synthetic construct
  misc_feature 1..22: note = chemically synthesized
  source 1..22: mol_type = other DNA
tctcagtttggtattttttact

SEQ ID NO: 71348 - DNA, 22 bp, synthetic construct
  misc_feature 1..22: note = chemically synthesized
  source 1..22: mol_type = other DNA
ctcagtttggtattttttactg

SEQ ID NO: 71349 - DNA, 22 bp, synthetic construct
  misc_feature 1..22: note = chemically synthesized
  source 1..22: mol_type = other DNA
tcagtttggtattttttactgc

SEQ ID NO: 71350 - DNA, 22 bp, synthetic construct
  misc_feature 1..22: note = chemically synthesized
  source 1..22: mol_type = other DNA
agtttggtattttttactgctt

SEQ ID NO: 71351 - DNA, 22 bp, synthetic construct
  misc_feature 1..22: note = chemically synthesized
  source 1..22: mol_type = other DNA
ggtattttttactgcttggaga

SEQ ID NO: 71352 - DNA, 22 bp, synthetic construct
  misc_feature 1..22: note = chemically synthesized
  source 1..22: mol_type = other DNA
gtattttttactgcttggagat

SEQ ID NO: 71353 - DNA, 22 bp, synthetic construct
  misc_feature 1..22: note = chemically synthesized
  source 1..22: mol_type = other DNA
tttactgcttggagatccagaa

SEQ ID NO: 71354 - DNA, 22 bp, synthetic construct
  misc_feature 1..22: note = chemically synthesized
  source 1..22: mol_type = other DNA
ttactgcttggagatccagaag

SEQ ID NO: 71355 - DNA, 22 bp, synthetic construct
  misc_feature 1..22: note = chemically synthesized
  source 1..22: mol_type = other DNA
tactgcttggagatccagaaga

SEQ ID NO: 71356 - DNA, 22 bp, synthetic construct
  misc_feature 1..22: note = chemically synthesized
  source 1..22: mol_type = other DNA
actgcttggagatccagaagag

SEQ ID NO: 71357 - DNA, 22 bp, synthetic construct
  misc_feature 1..22: note = chemically synthesized
  source 1..22: mol_type = other DNA
ctgcttggagatccagaagaga

SEQ ID NO: 71358 - DNA, 22 bp, synthetic construct
  misc_feature 1..22: note = chemically synthesized
  source 1..22: mol_type = other DNA
cttggagatccagaagagaatt

SEQ ID NO: 71359 - DNA, 22 bp, synthetic construct
  misc_feature 1..22: note = chemically synthesized
  source 1..22: mol_type = other DNA
ggagatccagaagagaattaga

SEQ ID NO: 71360 - DNA, 22 bp, synthetic construct
  misc_feature 1..22: note = chemically synthesized
  source 1..22: mol_type = other DNA
gagatccagaagagaattagaa

SEQ ID NO: 71361 - DNA, 22 bp, synthetic construct
  misc_feature 1..22: note = chemically synthesized
  source 1..22: mol_type = other DNA
gaaacaacatagcaaattaaaa

SEQ ID NO: 71362 - DNA, 22 bp, synthetic construct
  misc_feature 1..22: note = chemically synthesized
  source 1..22: mol_type = other DNA
aaataggtttgtcaataataga

SEQ ID NO: 71363 - DNA, 22 bp, synthetic construct
  misc_feature 1..22: note = chemically synthesized
  source 1..22: mol_type = other DNA
gtcaataatagagctcagacac

SEQ ID NO: 71364 - DNA, 22 bp, synthetic construct
  misc_feature 1..22: note = chemically synthesized
  source 1..22: mol_type = other DNA
tcaataatagagctcagacacc

SEQ ID NO: 71365 - DNA, 22 bp, synthetic construct
  misc_feature 1..22: note = chemically synthesized
  source 1..22: mol_type = other DNA
agacacctgtgtgctgtagatt

SEQ ID NO: 71366 - DNA, 22 bp, synthetic construct
  misc_feature 1..22: note = chemically synthesized
  source 1..22: mol_type = other DNA
tgtgctgtagattcacatacag

SEQ ID NO: 71367 - DNA, 22 bp, synthetic construct
  misc_feature 1..22: note = chemically synthesized
  source 1..22: mol_type = other DNA
tagattcacatacaggccgtga

SEQ ID NO: 71368 - DNA, 22 bp, synthetic construct
  misc_feature 1..22: note = chemically synthesized
  source 1..22: mol_type = other DNA
acatacaggccgtgaacctaag

SEQ ID NO: 71369 - DNA, 22 bp, synthetic construct
  misc_feature 1..22: note = chemically synthesized
  source 1..22: mol_type = other DNA
agtggggaaaatcctacctatc

SEQ ID NO: 71370 - DNA, 22 bp, synthetic construct
  misc_feature 1..22: note = chemically synthesized
  source 1..22: mol_type = other DNA
cctatccaccttctggctagat

SEQ ID NO: 71371 - DNA, 22 bp, synthetic construct
  misc_feature 1..22: note = chemically synthesized
  source 1..22: mol_type = other DNA
tccaccttctggctagattacc

SEQ ID NO: 71372 - DNA, 22 bp, synthetic construct
  misc_feature 1..22: note = chemically synthesized
  source 1..22: mol_type = other DNA
ctggctagattacctagcttag

SEQ ID NO: 71373 - DNA, 22 bp, synthetic construct
  misc_feature 1..22: note = chemically synthesized
  source 1..22: mol_type = other DNA
tggctagattacctagcttagt

SEQ ID NO: 71374 - DNA, 22 bp, synthetic construct
  misc_feature 1..22: note = chemically synthesized
  source 1..22: mol_type = other DNA
gctagattacctagcttagtga

SEQ ID NO: 71375 - DNA, 22 bp, synthetic construct
  misc_feature 1..22: note = chemically synthesized
  source 1..22: mol_type = other DNA
gattacctagcttagtgaaaag

SEQ ID NO: 71376 - DNA, 22 bp, synthetic construct
  misc_feature 1..22: note = chemically synthesized
  source 1..22: mol_type = other DNA
cctagcttagtgaaaagatagc

SEQ ID NO: 71377 - DNA, 22 bp, synthetic construct
  misc_feature 1..22: note = chemically synthesized
  source 1..22: mol_type = other DNA
gcttagtgaaaagatagccaaa

SEQ ID NO: 71378 - DNA, 22 bp, synthetic construct
  misc_feature 1..22: note = chemically synthesized
  source 1..22: mol_type = other DNA
agtgaaaagatagccaaataat

SEQ ID NO: 71379 - DNA, 22 bp, synthetic construct
  misc_feature 1..22: note = chemically synthesized
  source 1..22: mol_type = other DNA
gtgaaaagatagccaaataatt

SEQ ID NO: 71380 - DNA, 22 bp, synthetic construct
  misc_feature 1..22: note = chemically synthesized
  source 1..22: mol_type = other DNA
gcatgtgaattatttcctgctt

SEQ ID NO: 71381 - DNA, 22 bp, synthetic construct
  misc_feature 1..22: note = chemically synthesized
  source 1..22: mol_type = other DNA
tttcctgcttattcataataaa

SEQ ID NO: 71382 - DNA, 22 bp, synthetic construct
  misc_feature 1..22: note = chemically synthesized
  source 1..22: mol_type = other DNA
cctgcttattcataataaataa

SEQ ID NO: 71383 - DNA, 22 bp, synthetic construct
  misc_feature 1..22: note = chemically synthesized
  source 1..22: mol_type = other DNA
ctgcttattcataataaataat

SEQ ID NO: 71384 - DNA, 22 bp, synthetic construct
  misc_feature 1..22: note = chemically synthesized
  source 1..22: mol_type = other DNA
cttattcataataaataatgac

SEQ ID NO: 71385 - DNA, 22 bp, synthetic construct
  misc_feature 1..22: note = chemically synthesized
  source 1..22: mol_type = other DNA
attcataataaataatgactgt

SEQ ID NO: 71386 - DNA, 22 bp, synthetic construct
  misc_feature 1..22: note = chemically synthesized
  source 1..22: mol_type = other DNA
ttcataataaataatgactgtc

SEQ ID NO: 71387 - DNA, 22 bp, synthetic construct
  misc_feature 1..22: note = chemically synthesized
  source 1..22: mol_type = other DNA
ataataaataatgactgtctac

SEQ ID NO: 71388 - DNA, 22 bp, synthetic construct
  misc_feature 1..22: note = chemically synthesized
  source 1..22: mol_type = other DNA
tctacagtagtgaactacctta

SEQ ID NO: 71389 - DNA, 22 bp, synthetic construct
  misc_feature 1..22: note = chemically synthesized
  source 1..22: mol_type = other DNA
cagtagtgaactaccttatact

SEQ ID NO: 71390 - DNA, 22 bp, synthetic construct
  misc_feature 1..22: note = chemically synthesized
  source 1..22: mol_type = other DNA
ccttatactgtatacagtgctg

SEQ ID NO: 71391 - DNA, 22 bp, synthetic construct
  misc_feature 1..22: note = chemically synthesized
  source 1..22: mol_type = other DNA
atactgtatacagtgctgtctc

SEQ ID NO: 71392 - DNA, 22 bp, synthetic construct
  misc_feature 1..22: note = chemically synthesized
  source 1..22: mol_type = other DNA
tactgtatacagtgctgtctcg

SEQ ID NO: 71393 - DNA, 22 bp, synthetic construct
  misc_feature 1..22: note = chemically synthesized
  source 1..22: mol_type = other DNA
tatacagtgctgtctcgtgcat

SEQ ID NO: 71394 - DNA, 22 bp, synthetic construct
  misc_feature 1..22: note = chemically synthesized
  source 1..22: mol_type = other DNA
tctcgtgcattatttcacctgc

SEQ ID NO: 71395 - DNA, 22 bp, synthetic construct
  misc_feature 1..22: note = chemically synthesized
  source 1..22: mol_type = other DNA
gtgcattatttcacctgctctc

SEQ ID NO: 71396 - DNA, 22 bp, synthetic construct
  misc_feature 1..22: note = chemically synthesized
  source 1..22: mol_type = other DNA
tttcacctgctctctgggacag

SEQ ID NO: 71397 - DNA, 22 bp, synthetic construct
  misc_feature 1..22: note = chemically synthesized
  source 1..22: mol_type = other DNA
cacctgctctctgggacagatc

SEQ ID NO: 71398 - DNA, 22 bp, synthetic construct
  misc_feature 1..22: note = chemically synthesized
  source 1..22: mol_type = other DNA
acctgctctctgggacagatct

SEQ ID NO: 71399 - DNA, 22 bp, synthetic construct
  misc_feature 1..22: note = chemically synthesized
  source 1..22: mol_type = other DNA
ctctctgggacagatctcacga

SEQ ID NO: 71400 - DNA, 22 bp, synthetic construct
  misc_feature 1..22: note = chemically synthesized
  source 1..22: mol_type = other DNA
tctgggacagatctcacgactt

SEQ ID NO: 71401 - DNA, 22 bp, synthetic construct
  misc_feature 1..22: note = chemically synthesized
  source 1..22: mol_type = other DNA
tgggacagatctcacgacttct

SEQ ID NO: 71402 - DNA, 22 bp, synthetic construct
  misc_feature 1..22: note = chemically synthesized
  source 1..22: mol_type = other DNA
ggacagatctcacgacttctac

SEQ ID NO: 71403 - DNA, 22 bp, synthetic construct
  misc_feature 1..22: note = chemically synthesized
  source 1..22: mol_type = other DNA
acgacttctactttatggaggt

SEQ ID NO: 71404 - DNA, 22 bp, synthetic construct
  misc_feature 1..22: note = chemically synthesized
  source 1..22: mol_type = other DNA
ctactttatggaggtggagatt

SEQ ID NO: 71405 - DNA, 22 bp, synthetic construct
  misc_feature 1..22: note = chemically synthesized
  source 1..22: mol_type = other DNA
tactttatggaggtggagattg

SEQ ID NO: 71406 - DNA, 22 bp, synthetic construct
  misc_feature 1..22: note = chemically synthesized
  source 1..22: mol_type = other DNA
ctttatggaggtggagattgag

SEQ ID NO: 71407 - DNA, 22 bp, synthetic construct
  misc_feature 1..22: note = chemically synthesized
  source 1..22: mol_type = other DNA
tatggaggtggagattgaggct

SEQ ID NO: 71408 - DNA, 22 bp, synthetic construct
  misc_feature 1..22: note = chemically synthesized
  source 1..22: mol_type = other DNA
atggaggtggagattgaggctt

SEQ ID NO: 71409 - DNA, 22 bp, synthetic construct
  misc_feature 1..22: note = chemically synthesized
  source 1..22: mol_type = other DNA
tggaggtggagattgaggctta

SEQ ID NO: 71410 - DNA, 22 bp, synthetic construct
  misc_feature 1..22: note = chemically synthesized
  source 1..22: mol_type = other DNA
aggcttaccaaggttaagggct

SEQ ID NO: 71411 - DNA, 22 bp, synthetic construct
  misc_feature 1..22: note = chemically synthesized
  source 1..22: mol_type = other DNA
accaaggttaagggcttgccag

SEQ ID NO: 71412 - DNA, 22 bp, synthetic construct
  misc_feature 1..22: note = chemically synthesized
  source 1..22: mol_type = other DNA
ccaaggttaagggcttgccaga

SEQ ID NO: 71413 - DNA, 22 bp, synthetic construct
  misc_feature 1..22: note = chemically synthesized
  source 1..22: mol_type = other DNA
agggcttgccagaggccacatc

SEQ ID NO: 71414 - DNA, 22 bp, synthetic construct
  misc_feature 1..22: note = chemically synthesized
  source 1..22: mol_type = other DNA
gccagaggccacatcagtaaga

SEQ ID NO: 71415 - DNA, 22 bp, synthetic construct
  misc_feature 1..22: note = chemically synthesized
  source 1..22: mol_type = other DNA
ccagaggccacatcagtaagag

SEQ ID NO: 71416 - DNA, 22 bp, synthetic construct
  misc_feature 1..22: note = chemically synthesized
  source 1..22: mol_type = other DNA
tctggtttcttgtccagagcta

SEQ ID NO: 71417 - DNA, 22 bp, synthetic construct
  misc_feature 1..22: note = chemically synthesized
  source 1..22: mol_type = other DNA
ctggtttcttgtccagagctaa

SEQ ID NO: 71418 - DNA, 22 bp, synthetic construct
  misc_feature 1..22: note = chemically synthesized
  source 1..22: mol_type = other DNA
tggtttcttgtccagagctaat

SEQ ID NO: 71419 - DNA, 22 bp, synthetic construct
  misc_feature 1..22: note = chemically synthesized
  source 1..22: mol_type = other DNA
gtttcttgtccagagctaattt

SEQ ID NO: 71420 - DNA, 22 bp, synthetic construct
  misc_feature 1..22: note = chemically synthesized
  source 1..22: mol_type = other DNA
cttgtccagagctaatttcacc

SEQ ID NO: 71421 - DNA, 22 bp, synthetic construct
  misc_feature 1..22: note = chemically synthesized
  source 1..22: mol_type = other DNA
ttgtccagagctaatttcacca

SEQ ID NO: 71422 - DNA, 22 bp, synthetic construct
  misc_feature 1..22: note = chemically synthesized
  source 1..22: mol_type = other DNA
gtccagagctaatttcaccaaa

SEQ ID NO: 71423 - DNA, 22 bp, synthetic construct
  misc_feature 1..22: note = chemically synthesized
  source 1..22: mol_type = other DNA
tccagagctaatttcaccaaac

SEQ ID NO: 71424 - DNA, 22 bp, synthetic construct
  misc_feature 1..22: note = chemically synthesized
  source 1..22: mol_type = other DNA
atttcaccaaactctgtttaac

SEQ ID NO: 71425 - DNA, 22 bp, synthetic construct
  misc_feature 1..22: note = chemically synthesized
  source 1..22: mol_type = other DNA
caccaaactctgtttaactgat

SEQ ID NO: 71426 - DNA, 22 bp, synthetic construct
  misc_feature 1..22: note = chemically synthesized
  source 1..22: mol_type = other DNA
accaaactctgtttaactgatc

SEQ ID NO: 71427 - DNA, 22 bp, synthetic construct
  misc_feature 1..22: note = chemically synthesized
  source 1..22: mol_type = other DNA
tgtttaactgatcaaagggagt

SEQ ID NO: 71428 - DNA, 22 bp, synthetic construct
  misc_feature 1..22: note = chemically synthesized
  source 1..22: mol_type = other DNA
tttaactgatcaaagggagtat

SEQ ID NO: 71429 - DNA, 22 bp, synthetic construct
  misc_feature 1..22: note = chemically synthesized
  source 1..22: mol_type = other DNA
aactgatcaaagggagtatctt

SEQ ID NO: 71430 - DNA, 22 bp, synthetic construct
  misc_feature 1..22: note = chemically synthesized
  source 1..22: mol_type = other DNA
actgatcaaagggagtatcttt

SEQ ID NO: 71431 - DNA, 22 bp, synthetic construct
  misc_feature 1..22: note = chemically synthesized
  source 1..22: mol_type = other DNA
atcaaagggagtatcttttcct

SEQ ID NO: 71432 - DNA, 22 bp, synthetic construct
  misc_feature 1..22: note = chemically synthesized
  source 1..22: mol_type = other DNA
ttcctgtgttagcacataagtc

SEQ ID NO: 71433 - DNA, 22 bp, synthetic construct
  misc_feature 1..22: note = chemically synthesized
  source 1..22: mol_type = other DNA
tcctgtgttagcacataagtca

SEQ ID NO: 71434 - DNA, 22 bp, synthetic construct
  misc_feature 1..22: note = chemically synthesized
  source 1..22: mol_type = other DNA
cctgtgttagcacataagtcat

SEQ ID NO: 71435 - DNA, 22 bp, synthetic construct
  misc_feature 1..22: note = chemically synthesized
  source 1..22: mol_type = other DNA
ctgtgttagcacataagtcata

SEQ ID NO: 71436 - DNA, 22 bp, synthetic construct
  misc_feature 1..22: note = chemically synthesized
  source 1..22: mol_type = other DNA
tgttagcacataagtcataaat

SEQ ID NO: 71437 - DNA, 22 bp, synthetic construct
  misc_feature 1..22: note = chemically synthesized
  source 1..22: mol_type = other DNA
gcacataagtcataaatgttca

SEQ ID NO: 71438 - DNA, 22 bp, synthetic construct
  misc_feature 1..22: note = chemically synthesized
  source 1..22: mol_type = other DNA
acagacacacacatgtggctta

SEQ ID NO: 71439 - DNA, 22 bp, synthetic construct
  misc_feature 1..22: note = chemically synthesized
  source 1..22: mol_type = other DNA
acacatacagacccaggatggc

SEQ ID NO: 71440 - DNA, 22 bp, synthetic construct
  misc_feature 1..22: note = chemically synthesized
  source 1..22: mol_type = other DNA
cacatacagacccaggatggcc

SEQ ID NO: 71441 - DNA, 22 bp, synthetic construct
  misc_feature 1..22: note = chemically synthesized
  source 1..22: mol_type = other DNA
tggtaaaggcatgcagagttgc

SEQ ID NO: 71442 - DNA, 22 bp, synthetic construct
  misc_feature 1..22: note = chemically synthesized
  source 1..22: mol_type = other DNA
ggtaaaggcatgcagagttgcc

SEQ ID NO: 71443 - DNA, 22 bp, synthetic construct
  misc_feature 1..22: note = chemically synthesized
  source 1..22: mol_type = other DNA
gtaaaggcatgcagagttgcct

SEQ ID NO: 71444 - DNA, 22 bp, synthetic construct
  misc_feature 1..22: note = chemically synthesized
  source 1..22: mol_type = other DNA
cctcttcctaccaacagatgtg

SEQ ID NO: 71445 - DNA, 22 bp, synthetic construct
  misc_feature 1..22: note = chemically synthesized
  source 1..22: mol_type = other DNA
ttcctaccaacagatgtgtgca

SEQ ID NO: 71446 - DNA, 22 bp, synthetic construct
  misc_feature 1..22: note = chemically synthesized
  source 1..22: mol_type = other DNA
cctaccaacagatgtgtgcact

SEQ ID NO: 71447 - DNA, 22 bp, synthetic construct
  misc_feature 1..22: note = chemically synthesized
  source 1..22: mol_type = other DNA
ctaccaacagatgtgtgcactg

SEQ ID NO: 71448 - DNA, 22 bp, synthetic construct
  misc_feature 1..22: note = chemically synthesized
  source 1..22: mol_type = other DNA
ccaacagatgtgtgcactgaga

SEQ ID NO: 71449 - DNA, 22 bp, synthetic construct
  misc_feature 1..22: note = chemically synthesized
  source 1..22: mol_type = other DNA
agaaagggaggttgcagcctcc

SEQ ID NO: 71450 - DNA, 22 bp, synthetic construct
  misc_feature 1..22: note = chemically synthesized
  source 1..22: mol_type = other DNA
cagcctccttgccatcaccttt

SEQ ID NO: 71451 - DNA, 22 bp, synthetic construct
  misc_feature 1..22: note = chemically synthesized
  source 1..22: mol_type = other DNA
cttgccatcacctttcccctgt

SEQ ID NO: 71452 - DNA, 22 bp, synthetic construct
  misc_feature 1..22: note = chemically synthesized
  source 1..22: mol_type = other DNA
gccatcacctttcccctgtggc

SEQ ID NO: 71453 - DNA, 22 bp, synthetic construct
  misc_feature 1..22: note = chemically synthesized
  source 1..22: mol_type = other DNA
ccatcacctttcccctgtggct

SEQ ID NO: 71454 - DNA, 22 bp, synthetic construct
  misc_feature 1..22: note = chemically synthesized
  source 1..22: mol_type = other DNA
tcccctgtggcttttccatgac

SEQ ID NO: 71455 - DNA, 22 bp, synthetic construct
  misc_feature 1..22: note = chemically synthesized
  source 1..22: mol_type = other DNA
cccctgtggcttttccatgaca

SEQ ID NO: 71456 - DNA, 22 bp, synthetic construct
  misc_feature 1..22: note = chemically synthesized
  source 1..22: mol_type = other DNA
ccctgtggcttttccatgacaa

SEQ ID NO: 71457 - DNA, 22 bp, synthetic construct
  misc_feature 1..22: note = chemically synthesized
  source 1..22: mol_type = other DNA
tggcttttccatgacaaataac

SEQ ID NO: 71458 - DNA, 22 bp, synthetic construct
  misc_feature 1..22: note = chemically synthesized
  source 1..22: mol_type = other DNA
ttccatgacaaataaccctgat

SEQ ID NO: 71459 - DNA, 22 bp, synthetic construct
  misc_feature 1..22: note = chemically synthesized
  source 1..22: mol_type = other DNA
tccatgacaaataaccctgatt

SEQ ID NO: 71460 - DNA, 22 bp, synthetic construct
  misc_feature 1..22: note = chemically synthesized
  source 1..22: mol_type = other DNA
ccatgacaaataaccctgattg

SEQ ID NO: 71461 - DNA, 22 bp, synthetic construct
  misc_feature 1..22: note = chemically synthesized
  source 1..22: mol_type = other DNA
catgacaaataaccctgattgc

SEQ ID NO: 71462 - DNA, 22 bp, synthetic construct
  misc_feature 1..22: note = chemically synthesized
  source 1..22: mol_type = other DNA
attgcacgagtggcctgtttgt

SEQ ID NO: 71463 - DNA, 22 bp, synthetic construct
  misc_feature 1..22: note = chemically synthesized
  source 1..22: mol_type = other DNA
cacgagtggcctgtttgtgact

SEQ ID NO: 71464 - DNA, 22 bp, synthetic construct
  misc_feature 1..22: note = chemically synthesized
  source 1..22: mol_type = other DNA
tttgtgacttcctatcaattag

SEQ ID NO: 71465 - DNA, 22 bp, synthetic construct
  misc_feature 1..22: note = chemically synthesized
  source 1..22: mol_type = other DNA
gtgacttcctatcaattagttg

SEQ ID NO: 71466 - DNA, 22 bp, synthetic construct
  misc_feature 1..22: note = chemically synthesized
  source 1..22: mol_type = other DNA
tgacttcctatcaattagttgg

SEQ ID NO: 71467 - DNA, 22 bp, synthetic construct
  misc_feature 1..22: note = chemically synthesized
  source 1..22: mol_type = other DNA
cctatcaattagttgggacttc

SEQ ID NO: 71468 - DNA, 22 bp, synthetic construct
  misc_feature 1..22: note = chemically synthesized
  source 1..22: mol_type = other DNA
ctatcaattagttgggacttcc

SEQ ID NO: 71469 - DNA, 22 bp, synthetic construct
  misc_feature 1..22: note = chemically synthesized
  source 1..22: mol_type = other DNA
tcaattagttgggacttccaga

SEQ ID NO: 71470 - DNA, 22 bp, synthetic construct
  misc_feature 1..22: note = chemically synthesized
  source 1..22: mol_type = other DNA
gttgggacttccagacaagaag

SEQ ID NO: 71471 - DNA, 22 bp, synthetic construct
  misc_feature 1..22: note = chemically synthesized
  source 1..22: mol_type = other DNA
ggacttccagacaagaagttat

SEQ ID NO: 71472 - DNA, 22 bp, synthetic construct
  misc_feature 1..22: note = chemically synthesized
  source 1..22: mol_type = other DNA
ccagacaagaagttatttcata

SEQ ID NO: 71473 - DNA, 22 bp, synthetic construct
  misc_feature 1..22: note = chemically synthesized
  source 1..22: mol_type = other DNA
cagacaagaagttatttcataa

SEQ ID NO: 71474 - DNA, 22 bp, synthetic construct
  misc_feature 1..22: note = chemically synthesized
  source 1..22: mol_type = other DNA
tttcataaagaaaccctctccc

SEQ ID NO: 71475 - DNA, 22 bp, synthetic construct
  misc_feature 1..22: note = chemically synthesized
  source 1..22: mol_type = other DNA
cataaagaaaccctctccctgc

SEQ ID NO: 71476 - DNA, 22 bp, synthetic construct
  misc_feature 1..22: note = chemically synthesized
  source 1..22: mol_type = other DNA
ataaagaaaccctctccctgcc

SEQ ID NO: 71477 - DNA, 22 bp, synthetic construct
  misc_feature 1..22: note = chemically synthesized
  source 1..22: mol_type = other DNA
tccctgccccatgctctgccta

SEQ ID NO: 71478 - DNA, 22 bp, synthetic construct
  misc_feature 1..22: note = chemically synthesized
  source 1..22: mol_type = other DNA
cctgccccatgctctgcctatg

SEQ ID NO: 71479 - DNA, 22 bp, synthetic construct
  misc_feature 1..22: note = chemically synthesized
  source 1..22: mol_type = other DNA
ccccatgctctgcctatgtgtt

SEQ ID NO: 71480 - DNA, 22 bp, synthetic construct
  misc_feature 1..22: note = chemically synthesized
  source 1..22: mol_type = other DNA
tgcctatgtgttgctgaaacat

SEQ ID NO: 71481 - DNA, 22 bp, synthetic construct
  misc_feature 1..22: note = chemically synthesized
  source 1..22: mol_type = other DNA
cctatgtgttgctgaaacataa

SEQ ID NO: 71482 - DNA, 22 bp, synthetic construct
  misc_feature 1..22: note = chemically synthesized
  source 1..22: mol_type = other DNA
tgtgttgctgaaacataagacc

SEQ ID NO: 71483 - DNA, 22 bp, synthetic construct
  misc_feature 1..22: note = chemically synthesized
  source 1..22: mol_type = other DNA
ctgaaacataagaccattaggg

SEQ ID NO: 71484 - DNA, 22 bp, synthetic construct
  misc_feature 1..22: note = chemically synthesized
  source 1..22: mol_type = other DNA
aaacataagaccattagggttt

SEQ ID NO: 71485 - DNA, 22 bp, synthetic construct
  misc_feature 1..22: note = chemically synthesized
  source 1..22: mol_type = other DNA
gggtttctgtgatggcttcctc

SEQ ID NO: 71486 - DNA, 22 bp, synthetic construct
  misc_feature 1..22: note = chemically synthesized
  source 1..22: mol_type = other DNA
ctgtgatggcttcctccctaaa

SEQ ID NO: 71487 - DNA, 22 bp, synthetic construct
  misc_feature 1..22: note = chemically synthesized
  source 1..22: mol_type = other DNA
tgtgatggcttcctccctaaat

SEQ ID NO: 71488 - DNA, 22 bp, synthetic construct
  misc_feature 1..22: note = chemically synthesized
  source 1..22: mol_type = other DNA
tgatggcttcctccctaaatgt

SEQ ID NO: 71489 - DNA, 22 bp, synthetic construct
  misc_feature 1..22: note = chemically synthesized
  source 1..22: mol_type = other DNA
cctccctaaatgtgctgaactc

SEQ ID NO: 71490 - DNA, 22 bp, synthetic construct
  misc_feature 1..22: note = chemically synthesized
  source 1..22: mol_type = other DNA
ctccctaaatgtgctgaactcc

SEQ ID NO: 71491 - DNA, 22 bp, synthetic construct
  misc_feature 1..22: note = chemically synthesized
  source 1..22: mol_type = other DNA
cctaaatgtgctgaactccttg

SEQ ID NO: 71492 - DNA, 22 bp, synthetic construct
  misc_feature 1..22: note = chemically synthesized
  source 1..22: mol_type = other DNA
aatgtgctgaactccttgctga

SEQ ID NO: 71493 - DNA, 22 bp, synthetic construct
  misc_feature 1..22: note = chemically synthesized
  source 1..22: mol_type = other DNA
aactccttgctgatgcctagaa

SEQ ID NO: 71494 - DNA, 22 bp, synthetic construct
  misc_feature 1..22: note = chemically synthesized
  source 1..22: mol_type = other DNA
cttgctgatgcctagaaagagt

SEQ ID NO: 71495 - DNA, 22 bp, synthetic construct
  misc_feature 1..22: note = chemically synthesized
  source 1..22: mol_type = other DNA
gctgatgcctagaaagagtgac

SEQ ID NO: 71496 - DNA, 22 bp, synthetic construct
  misc_feature 1..22: note = chemically synthesized
  source 1..22: mol_type = other DNA
ctgatgcctagaaagagtgaca

SEQ ID NO: 71497 - DNA, 22 bp, synthetic construct
  misc_feature 1..22: note = chemically synthesized
  source 1..22: mol_type = other DNA
atgcctagaaagagtgacacca

SEQ ID NO: 71498 - DNA, 22 bp, synthetic construct
  misc_feature 1..22: note = chemically synthesized
  source 1..22: mol_type = other DNA
gaaagagtgacaccacttccaa

SEQ ID NO: 71499 - DNA, 22 bp, synthetic construct
  misc_feature 1..22: note = chemically synthesized
  source 1..22: mol_type = other DNA
ccaaagggaggccagaactgaa

SEQ ID NO: 71500 - DNA, 22 bp, synthetic construct
  misc_feature 1..22: note = chemically synthesized
  source 1..22: mol_type = other DNA
caaagggaggccagaactgaaa

SEQ ID NO: 71501 - DNA, 22 bp, synthetic construct
  misc_feature 1..22: note = chemically synthesized
  source 1..22: mol_type = other DNA
aaacaacaatcctgggtcttga

SEQ ID NO: 71502 - DNA, 22 bp, synthetic construct
  misc_feature 1..22: note = chemically synthesized
  source 1..22: mol_type = other DNA
ggtcttgagacaagttcagcct

SEQ ID NO: 71503 - DNA, 22 bp, synthetic construct
  misc_feature 1..22: note = chemically synthesized
  source 1..22: mol_type = other DNA
gagacaagttcagcctttgtaa

SEQ ID NO: 71504 - DNA, 22 bp, synthetic construct
  misc_feature 1..22: note = chemically synthesized
  source 1..22: mol_type = other DNA
agacaagttcagcctttgtaac

SEQ ID NO: 71505 - DNA, 22 bp, synthetic construct
  misc_feature 1..22: note = chemically synthesized
  source 1..22: mol_type = other DNA
agcctttgtaactgcacttggt

SEQ ID NO: 71506 - DNA, 22 bp, synthetic construct
  misc_feature 1..22: note = chemically synthesized
  source 1..22: mol_type = other DNA
tgtaactgcacttggtggtcac

SEQ ID NO: 71507 - DNA, 22 bp, synthetic construct
  misc_feature 1..22: note = chemically synthesized
  source 1..22: mol_type = other DNA
gtaactgcacttggtggtcact

SEQ ID NO: 71508 - DNA, 22 bp, synthetic construct
  misc_feature 1..22: note = chemically synthesized
  source 1..22: mol_type = other DNA
taactgcacttggtggtcacta

SEQ ID NO: 71509 - DNA, 22 bp, synthetic construct
  misc_feature 1..22: note = chemically synthesized
  source 1..22: mol_type = other DNA
cacttggtggtcactacacttt

SEQ ID NO: 71510 - DNA, 22 bp, synthetic construct
  misc_feature 1..22: note = chemically synthesized
  source 1..22: mol_type = other DNA
ggtggtcactacactttcattt

SEQ ID NO: 71511 - DNA, 22 bp, synthetic construct
  misc_feature 1..22: note = chemically synthesized
  source 1..22: mol_type = other DNA
gtggtcactacactttcatttc

SEQ ID NO: 71512 - DNA, 22 bp, synthetic construct
  misc_feature 1..22: note = chemically synthesized
  source 1..22: mol_type = other DNA
cactttcatttctggtctgtgt

SEQ ID NO: 71513 - DNA, 22 bp, synthetic construct
  misc_feature 1..22: note = chemically synthesized
  source 1..22: mol_type = other DNA
tcatttctggtctgtgtttcta

SEQ ID NO: 71514 - DNA, 22 bp, synthetic construct
  misc_feature 1..22: note = chemically synthesized
  source 1..22: mol_type = other DNA
catttctggtctgtgtttctac

SEQ ID NO: 71515 - DNA, 22 bp, synthetic construct
  misc_feature 1..22: note = chemically synthesized
  source 1..22: mol_type = other DNA
atttctggtctgtgtttctacc

SEQ ID NO: 71516 - DNA, 22 bp, synthetic construct
  misc_feature 1..22: note = chemically synthesized
  source 1..22: mol_type = other DNA
ctggtctgtgtttctaccccca

SEQ ID NO: 71517 - DNA, 22 bp, synthetic construct
  misc_feature 1..22: note = chemically synthesized
  source 1..22: mol_type = other DNA
tggtctgtgtttctacccccac

SEQ ID NO: 71518 - DNA, 22 bp, synthetic construct
  misc_feature 1..22: note = chemically synthesized
  source 1..22: mol_type = other DNA
gtctgtgtttctacccccactt

SEQ ID NO: 71519 - DNA, 22 bp, synthetic construct
  misc_feature 1..22: note = chemically synthesized
  source 1..22: mol_type = other DNA
tgtttctacccccactttttat

SEQ ID NO: 71520 - DNA, 22 bp, synthetic construct
  misc_feature 1..22: note = chemically synthesized
  source 1..22: mol_type = other DNA
ctacccccactttttatatatt

SEQ ID NO: 71521 - DNA, 22 bp, synthetic construct
  misc_feature 1..22: note = chemically synthesized
  source 1..22: mol_type = other DNA
tacccccactttttatatattt

SEQ ID NO: 71522 - DNA, 22 bp, synthetic construct
  misc_feature 1..22: note = chemically synthesized
  source 1..22: mol_type = other DNA
cccccactttttatatatttct

SEQ ID NO: 71523 - DNA, 22 bp, synthetic construct
  misc_feature 1..22: note = chemically synthesized
  source 1..22: mol_type = other DNA
tttatatatttcttctcagagt

SEQ ID NO: 71524 - DNA, 22 bp, synthetic construct
  misc_feature 1..22: note = chemically synthesized
  source 1..22: mol_type = other DNA
ttatatatttcttctcagagtc

SEQ ID NO: 71525 - DNA, 22 bp, synthetic construct
  misc_feature 1..22: note = chemically synthesized
  source 1..22: mol_type = other DNA
tatatatttcttctcagagtca

SEQ ID NO: 71526 - DNA, 22 bp, synthetic construct
  misc_feature 1..22: note = chemically synthesized
  source 1..22: mol_type = other DNA
atatatttcttctcagagtcag

SEQ ID NO: 71527 - DNA, 22 bp, synthetic construct
  misc_feature 1..22: note = chemically synthesized
  source 1..22: mol_type = other DNA
tatatttcttctcagagtcagt

SEQ ID NO: 71528 - DNA, 22 bp, synthetic construct
  misc_feature 1..22: note = chemically synthesized
  source 1..22: mol_type = other DNA
cttctcagagtcagtttgtaaa

SEQ ID NO: 71529 - DNA, 22 bp, synthetic construct
  misc_feature 1..22: note = chemically synthesized
  source 1..22: mol_type = other DNA
ttctcagagtcagtttgtaaat

SEQ ID NO: 71530 - DNA, 22 bp, synthetic construct
  misc_feature 1..22: note = chemically synthesized
  source 1..22: mol_type = other DNA
ctcagagtcagtttgtaaataa

SEQ ID NO: 71531 - DNA, 22 bp, synthetic construct
  misc_feature 1..22: note = chemically synthesized
  source 1..22: mol_type = other DNA
tcagagtcagtttgtaaataag

SEQ ID NO: 71532 - DNA, 22 bp, synthetic construct
  misc_feature 1..22: note = chemically synthesized
  source 1..22: mol_type = other DNA
agagtcagtttgtaaataagtg

SEQ ID NO: 71533 - DNA, 22 bp, synthetic construct
  misc_feature 1..22: note = chemically synthesized
  source 1..22: mol_type = other DNA
gtaaataagtggatatctctaa

SEQ ID NO: 71534 - DNA, 22 bp, synthetic construct
  misc_feature 1..22: note = chemically synthesized
  source 1..22: mol_type = other DNA
taaataagtggatatctctaaa

SEQ ID NO: 71535 - DNA, 22 bp, synthetic construct
  misc_feature 1..22: note = chemically synthesized
  source 1..22: mol_type = other DNA
taaaagtgggatttttaagggg

SEQ ID NO: 71536 - DNA, 22 bp, synthetic construct
  misc_feature 1..22: note = chemically synthesized
  source 1..22: mol_type = other DNA
aaagtgggatttttaaggggca

SEQ ID NO: 71537 - DNA, 22 bp, synthetic construct
  misc_feature 1..22: note = chemically synthesized
  source 1..22: mol_type = other DNA
ttaaggggcaagaggataacag

SEQ ID NO: 71538 - DNA, 22 bp, synthetic construct
  misc_feature 1..22: note = chemically synthesized
  source 1..22: mol_type = other DNA
taaggggcaagaggataacaga

SEQ ID NO: 71539 - DNA, 22 bp, synthetic construct
  misc_feature 1..22: note = chemically synthesized
  source 1..22: mol_type = other DNA
aaggggcaagaggataacagaa

SEQ ID NO: 71540 - DNA, 22 bp, synthetic construct
  misc_feature 1..22: note = chemically synthesized
  source 1..22: mol_type = other DNA
aggggcaagaggataacagaag

SEQ ID NO: 71541 - DNA, 22 bp, synthetic construct
  misc_feature 1..22: note = chemically synthesized
  source 1..22: mol_type = other DNA
ttttatcctcttcactgtggag

SEQ ID NO: 71542 - DNA, 22 bp, synthetic construct
  misc_feature 1..22: note = chemically synthesized
  source 1..22: mol_type = other DNA
tatcctcttcactgtggagaag

SEQ ID NO: 71543 - DNA, 22 bp, synthetic construct
  misc_feature 1..22: note = chemically synthesized
  source 1..22: mol_type = other DNA
atcctcttcactgtggagaaga

SEQ ID NO: 71544 - DNA, 22 bp, synthetic construct
  misc_feature 1..22: note = chemically synthesized
  source 1..22: mol_type = other DNA
tcctcttcactgtggagaagaa

SEQ ID NO: 71545 - DNA, 22 bp, synthetic construct
  misc_feature 1..22: note = chemically synthesized
  source 1..22: mol_type = other DNA
ttcactgtggagaagaaccccc

SEQ ID NO: 71546 - DNA, 22 bp, synthetic construct
  misc_feature 1..22: note = chemically synthesized
  source 1..22: mol_type = other DNA
cactgtggagaagaaccccctc

SEQ ID NO: 71547 - DNA, 22 bp, synthetic construct
  misc_feature 1..22: note = chemically synthesized
  source 1..22: mol_type = other DNA
actgtggagaagaaccccctca

SEQ ID NO: 71548 - DNA, 22 bp, synthetic construct
  misc_feature 1..22: note = chemically synthesized
  source 1..22: mol_type = other DNA
tggagaagaaccccctcaaaac

SEQ ID NO: 71549 - DNA, 22 bp, synthetic construct
  misc_feature 1..22: note = chemically synthesized
  source 1..22: mol_type = other DNA
aaaacaaacagaacaaaaagac

SEQ ID NO: 71550 - DNA, 22 bp, synthetic construct
  misc_feature 1..22: note = chemically synthesized
  source 1..22: mol_type = other DNA
tcttttcccatggcttttaaag

SEQ ID NO: 71551 - DNA, 22 bp, synthetic construct
  misc_feature 1..22: note = chemically synthesized
  source 1..22: mol_type = other DNA
ttcccatggcttttaaagttga

SEQ ID NO: 71552 - DNA, 22 bp, synthetic construct
  misc_feature 1..22: note = chemically synthesized
  source 1..22: mol_type = other DNA
tcccatggcttttaaagttgaa

SEQ ID NO: 71553 - DNA, 22 bp, synthetic construct
  misc_feature 1..22: note = chemically synthesized
  source 1..22: mol_type = other DNA
cccatggcttttaaagttgaaa

SEQ ID NO: 71554 - DNA, 22 bp, synthetic construct
  misc_feature 1..22: note = chemically synthesized
  source 1..22: mol_type = other DNA
ccatggcttttaaagttgaaag

SEQ ID NO: 71555 - DNA, 22 bp, synthetic construct
  misc_feature 1..22: note = chemically synthesized
  source 1..22: mol_type = other DNA
ttaaagttgaaagacaacaaaa

SEQ ID NO: 71556 - DNA, 22 bp, synthetic construct
  misc_feature 1..22: note = chemically synthesized
  source 1..22: mol_type = other DNA
taaagttgaaagacaacaaaaa

SEQ ID NO: 71557 - DNA, 22 bp, synthetic construct
  misc_feature 1..22: note = chemically synthesized
  source 1..22: mol_type = other DNA
aaagttgaaagacaacaaaaat

SEQ ID NO: 71558 - DNA, 22 bp, synthetic construct
  misc_feature 1..22: note = chemically synthesized
  source 1..22: mol_type = other DNA
aagttgaaagacaacaaaaatt

SEQ ID NO: 71559 - DNA, 22 bp, synthetic construct
  misc_feature 1..22: note = chemically synthesized
  source 1..22: mol_type = other DNA
aaagacaacaaaaatttattta

SEQ ID NO: 71560 - DNA, 22 bp, synthetic construct
  misc_feature 1..22: note = chemically synthesized
  source 1..22: mol_type = other DNA
atttacagaatttattaggaaa

SEQ ID NO: 71561 - DNA, 22 bp, synthetic construct
  misc_feature 1..22: note = chemically synthesized
  source 1..22: mol_type = other DNA
tttacagaatttattaggaaac

SEQ ID NO: 71562 - DNA, 22 bp, synthetic construct
  misc_feature 1..22: note = chemically synthesized
  source 1..22: mol_type = other DNA
acagaatttattaggaaacggt

SEQ ID NO: 71563 - DNA, 22 bp, synthetic construct
  misc_feature 1..22: note = chemically synthesized
  source 1..22: mol_type = other DNA
cagaatttattaggaaacggta

SEQ ID NO: 71564 - DNA, 22 bp, synthetic construct
  misc_feature 1..22: note = chemically synthesized
  source 1..22: mol_type = other DNA
attaggaaacggtattgtgtta

SEQ ID NO: 71565 - DNA, 22 bp, synthetic construct
  misc_feature 1..22: note = chemically synthesized
  source 1..22: mol_type = other DNA
ttaggaaacggtattgtgttag

SEQ ID NO: 71566 - DNA, 22 bp, synthetic construct
  misc_feature 1..22: note = chemically synthesized
  source 1..22: mol_type = other DNA
ggaaacggtattgtgttagggc

SEQ ID NO: 71567 - DNA, 22 bp, synthetic construct
  misc_feature 1..22: note = chemically synthesized
  source 1..22: mol_type = other DNA
tgttagggctagccattttttt

SEQ ID NO: 71568 - DNA, 22 bp, synthetic construct
  misc_feature 1..22: note = chemically synthesized
  source 1..22: mol_type = other DNA
gggctagccatttttttttttt

SEQ ID NO: 71569 - DNA, 22 bp, synthetic construct
  misc_feature 1..22: note = chemically synthesized
  source 1..22: mol_type = other DNA
gccatttttttttttttttttt

SEQ ID NO: 71570 - DNA, 22 bp, synthetic construct
  misc_feature 1..22: note = chemically synthesized
  source 1..22: mol_type = other DNA
tttttttttttttttttttttt

SEQ ID NO: 71571 - DNA, 22 bp, synthetic construct
  misc_feature 1..22: note = chemically synthesized
  source 1..22: mol_type = other DNA
ttttttttttttttttttttta

SEQ ID NO: 71572 - DNA, 22 bp, synthetic construct
  misc_feature 1..22: note = chemically synthesized
  source 1..22: mol_type = other DNA
ttttttttttttttttttttaa

SEQ ID NO: 71573 - DNA, 22 bp, synthetic construct
  misc_feature 1..22: note = chemically synthesized
  source 1..22: mol_type = other DNA
tttttttttttttttttttaag

SEQ ID NO: 71574 - DNA, 22 bp, synthetic construct
  misc_feature 1..22: note = chemically synthesized
  source 1..22: mol_type = other DNA
ttttttttttttttttttaaga

SEQ ID NO: 71575 - DNA, 22 bp, synthetic construct
  misc_feature 1..22: note = chemically synthesized
  source 1..22: mol_type = other DNA
tttttttttttttttttaagac

SEQ ID NO: 71576 - DNA, 22 bp, synthetic construct
  misc_feature 1..22: note = chemically synthesized
  source 1..22: mol_type = other DNA
ttttttttttttttttaagaca

SEQ ID NO: 71577 - DNA, 22 bp, synthetic construct
  misc_feature 1..22: note = chemically synthesized
  source 1..22: mol_type = other DNA
tttttttttttttttaagacag

SEQ ID NO: 71578 - DNA, 22 bp, synthetic construct
  misc_feature 1..22: note = chemically synthesized
  source 1..22: mol_type = other DNA
ttttttttttttttaagacaga

SEQ ID NO: 71579 - DNA, 22 bp, synthetic construct
  misc_feature 1..22: note = chemically synthesized
  source 1..22: mol_type = other DNA
tttttttttttttaagacagaa

SEQ ID NO: 71580 - DNA, 22 bp, synthetic construct
  misc_feature 1..22: note = chemically synthesized
  source 1..22: mol_type = other DNA
ttttttttttttaagacagaat

SEQ ID NO: 71581 - DNA, 22 bp, synthetic construct
  misc_feature 1..22: note = chemically synthesized
  source 1..22: mol_type = other DNA
tttttttttttaagacagaatc

SEQ ID NO: 71582 - DNA, 22 bp, synthetic construct
  misc_feature 1..22: note = chemically synthesized
  source 1..22: mol_type = other DNA
ttttttttttaagacagaatct

SEQ ID NO: 71583 - DNA, 22 bp, synthetic construct
  misc_feature 1..22: note = chemically synthesized
  source 1..22: mol_type = other DNA
tttttttttaagacagaatctc

SEQ ID NO: 71584 - DNA, 22 bp, synthetic construct
  misc_feature 1..22: note = chemically synthesized
  source 1..22: mol_type = other DNA
ttttttttaagacagaatctcg

SEQ ID NO: 71585 - DNA, 22 bp, synthetic construct
  misc_feature 1..22: note = chemically synthesized
  source 1..22: mol_type = other DNA
tttttttaagacagaatctcgc

SEQ ID NO: 71586 - DNA, 22 bp, synthetic construct
  misc_feature 1..22: note = chemically synthesized
  source 1..22: mol_type = other DNA
ttttttaagacagaatctcgct

SEQ ID NO: 71587 - DNA, 22 bp, synthetic construct
  misc_feature 1..22: note = chemically synthesized
  source 1..22: mol_type = other DNA
tttttaagacagaatctcgctc

SEQ ID NO: 71588 - DNA, 22 bp, synthetic construct
  misc_feature 1..22: note = chemically synthesized
  source 1..22: mol_type = other DNA
ttttaagacagaatctcgctct

SEQ ID NO: 71589 - DNA, 22 bp, synthetic construct
  misc_feature 1..22: note = chemically synthesized
  source 1..22: mol_type = other DNA
tttaagacagaatctcgctctg

SEQ ID NO: 71590 - DNA, 22 bp, synthetic construct
  misc_feature 1..22: note = chemically synthesized
  source 1..22: mol_type = other DNA
ttaagacagaatctcgctctgt

SEQ ID NO: 71591 - DNA, 22 bp, synthetic construct
  misc_feature 1..22: note = chemically synthesized
  source 1..22: mol_type = other DNA
taagacagaatctcgctctgtc

SEQ ID NO: 71592 - DNA, 22 bp, synthetic construct
  misc_feature 1..22: note = chemically synthesized
  source 1..22: mol_type = other DNA
aagacagaatctcgctctgtca

SEQ ID NO: 71593 - DNA, 22 bp, synthetic construct
  misc_feature 1..22: note = chemically synthesized
  source 1..22: mol_type = other DNA
agacagaatctcgctctgtcac

SEQ ID NO: 71594 - DNA, 22 bp, synthetic construct
  misc_feature 1..22: note = chemically synthesized
  source 1..22: mol_type = other DNA
gctctgtcacccaggctggagt

SEQ ID NO: 71595 - DNA, 22 bp, synthetic construct
  misc_feature 1..22: note = chemically synthesized
  source 1..22: mol_type = other DNA
tgtcacccaggctggagtgcag

SEQ ID NO: 71596 - DNA, 22 bp, synthetic construct
  misc_feature 1..22: note = chemically synthesized
  source 1..22: mol_type = other DNA
tcacccaggctggagtgcagtg

SEQ ID NO: 71597 - DNA, 22 bp, synthetic construct
  misc_feature 1..22: note = chemically synthesized
  source 1..22: mol_type = other DNA
gagtgcagtggcaaggactcag

SEQ ID NO: 71598 - DNA, 22 bp, synthetic construct
  misc_feature 1..22: note = chemically synthesized
  source 1..22: mol_type = other DNA
agctcaccacaacctccgccta

SEQ ID NO: 71599 - DNA, 22 bp, synthetic construct
  misc_feature 1..22: note = chemically synthesized
  source 1..22: mol_type = other DNA
accacaacctccgcctactggg

SEQ ID NO: 71600 - DNA, 22 bp, synthetic construct
  misc_feature 1..22: note = chemically synthesized
  source 1..22: mol_type = other DNA
cgcctactgggttcaagggatc

SEQ ID NO: 71601 - DNA, 22 bp, synthetic construct
  misc_feature 1..22: note = chemically synthesized
  source 1..22: mol_type = other DNA
ctgggttcaagggatcctcctg

SEQ ID NO: 71602 - DNA, 22 bp, synthetic construct
  misc_feature 1..22: note = chemically synthesized
  source 1..22: mol_type = other DNA
ggttcaagggatcctcctgcct

SEQ ID NO: 71603 - DNA, 22 bp, synthetic construct
  misc_feature 1..22: note = chemically synthesized
  source 1..22: mol_type = other DNA
aagggatcctcctgcctcagct

SEQ ID NO: 71604 - DNA, 22 bp, synthetic construct
  misc_feature 1..22: note = chemically synthesized
  source 1..22: mol_type = other DNA
ctgcctcagcttcccaagtagc

SEQ ID NO: 71605 - DNA, 22 bp, synthetic construct
  misc_feature 1..22: note = chemically synthesized
  source 1..22: mol_type = other DNA
cctcagcttcccaagtagctgg

SEQ ID NO: 71606 - DNA, 22 bp, synthetic construct
  misc_feature 1..22: note = chemically synthesized
  source 1..22: mol_type = other DNA
agcttcccaagtagctgggact

SEQ ID NO: 71607 - DNA, 22 bp, synthetic construct
  misc_feature 1..22: note = chemically synthesized
  source 1..22: mol_type = other DNA
cccaagtagctgggactacagg

SEQ ID NO: 71608 - DNA, 22 bp, synthetic construct
  misc_feature 1..22: note = chemically synthesized
  source 1..22: mol_type = other DNA
ccaagtagctgggactacaggc

SEQ ID NO: 71609 - DNA, 22 bp, synthetic construct
  misc_feature 1..22: note = chemically synthesized
  source 1..22: mol_type = other DNA
ggactacaggcacgcgccacca

SEQ ID NO: 71610 - DNA, 22 bp, synthetic construct
  misc_feature 1..22: note = chemically synthesized
  source 1..22: mol_type = other DNA
caggcacgcgccaccacgccca

SEQ ID NO: 71611 - DNA, 22 bp, synthetic construct
  misc_feature 1..22: note = chemically synthesized
  source 1..22: mol_type = other DNA
atattttttgtatttttagtag

SEQ ID NO: 71612 - DNA, 22 bp, synthetic construct
  misc_feature 1..22: note = chemically synthesized
  source 1..22: mol_type = other DNA
tttgtatttttagtagatacgg

SEQ ID NO: 71613 - DNA, 22 bp, synthetic construct
  misc_feature 1..22: note = chemically synthesized
  source 1..22: mol_type = other DNA
ttgtatttttagtagatacggc

SEQ ID NO: 71614 - DNA, 22 bp, synthetic construct
  misc_feature 1..22: note = chemically synthesized
  source 1..22: mol_type = other DNA
tgtatttttagtagatacggcg

SEQ ID NO: 71615 - DNA, 22 bp, synthetic construct
  misc_feature 1..22: note = chemically synthesized
  source 1..22: mol_type = other DNA
gtatttttagtagatacggcgt

SEQ ID NO: 71616 - DNA, 22 bp, synthetic construct
  misc_feature 1..22: note = chemically synthesized
  source 1..22: mol_type = other DNA
tatttttagtagatacggcgtt

SEQ ID NO: 71617 - DNA, 22 bp, synthetic construct
  misc_feature 1..22: note = chemically synthesized
  source 1..22: mol_type = other DNA
ttagtagatacggcgtttcacc

SEQ ID NO: 71618 - DNA, 22 bp, synthetic construct
  misc_feature 1..22: note = chemically synthesized
  source 1..22: mol_type = other DNA
tagtagatacggcgtttcaccg

SEQ ID NO: 71619 - DNA, 22 bp, synthetic construct
  misc_feature 1..22: note = chemically synthesized
  source 1..22: mol_type = other DNA
agtagatacggcgtttcaccgt

SEQ ID NO: 71620 - DNA, 22 bp, synthetic construct
  misc_feature 1..22: note = chemically synthesized
  source 1..22: mol_type = other DNA
gtagatacggcgtttcaccgtg

SEQ ID NO: 71621 - DNA, 22 bp, synthetic construct
  misc_feature 1..22: note = chemically synthesized
  source 1..22: mol_type = other DNA
caccgtgttagccaggatggtc

SEQ ID NO: 71622 - DNA, 22 bp, synthetic construct
  misc_feature 1..22: note = chemically synthesized
  source 1..22: mol_type = other DNA
accgtgttagccaggatggtct

SEQ ID NO: 71623 - DNA, 22 bp, synthetic construct
  misc_feature 1..22: note = chemically synthesized
  source 1..22: mol_type = other DNA
gccaggatggtctccatctcct

SEQ ID NO: 71624 - DNA, 22 bp, synthetic construct
  misc_feature 1..22: note = chemically synthesized
  source 1..22: mol_type = other DNA
catctcctgatctcgtgatcca

SEQ ID NO: 71625 - DNA, 22 bp, synthetic construct
  misc_feature 1..22: note = chemically synthesized
  source 1..22: mol_type = other DNA
ctgatctcgtgatccaccctcc

SEQ ID NO: 71626 - DNA, 22 bp, synthetic construct
  misc_feature 1..22: note = chemically synthesized
  source 1..22: mol_type = other DNA
atctcgtgatccaccctcctag

SEQ ID NO: 71627 - DNA, 22 bp, synthetic construct
  misc_feature 1..22: note = chemically synthesized
  source 1..22: mol_type = other DNA
gtgatccaccctcctaggcctc

SEQ ID NO: 71628 - DNA, 22 bp, synthetic construct
  misc_feature 1..22: note = chemically synthesized
  source 1..22: mol_type = other DNA
ctaggcctcccatagtgctggg

SEQ ID NO: 71629 - DNA, 22 bp, synthetic construct
  misc_feature 1..22: note = chemically synthesized
  source 1..22: mol_type = other DNA
ggcctcccatagtgctgggatt

SEQ ID NO: 71630 - DNA, 22 bp, synthetic construct
  misc_feature 1..22: note = chemically synthesized
  source 1..22: mol_type = other DNA
ccatagtgctgggattagaggc

SEQ ID NO: 71631 - DNA, 22 bp, synthetic construct
  misc_feature 1..22: note = chemically synthesized
  source 1..22: mol_type = other DNA
ggattagaggcattgcactacc

SEQ ID NO: 71632 - DNA, 22 bp, synthetic construct
  misc_feature 1..22: note = chemically synthesized
  source 1..22: mol_type = other DNA
gaggcattgcactacctcacct

SEQ ID NO: 71633 - DNA, 22 bp, synthetic construct
  misc_feature 1..22: note = chemically synthesized
  source 1..22: mol_type = other DNA
cactacctcacctggcctaggg

SEQ ID NO: 71634 - DNA, 22 bp, synthetic construct
  misc_feature 1..22: note = chemically synthesized
  source 1..22: mol_type = other DNA
cctcacctggcctagggctaga

SEQ ID NO: 71635 - DNA, 22 bp, synthetic construct
  misc_feature 1..22: note = chemically synthesized
  source 1..22: mol_type = other DNA
acctggcctagggctagacttt

SEQ ID NO: 71636 - DNA, 22 bp, synthetic construct
  misc_feature 1..22: note = chemically synthesized
  source 1..22: mol_type = other DNA
gcctagggctagacttttgaaa

SEQ ID NO: 71637 - DNA, 22 bp, synthetic construct
  misc_feature 1..22: note = chemically synthesized
  source 1..22: mol_type = other DNA
gggctagacttttgaaacccca

SEQ ID NO: 71638 - DNA, 22 bp, synthetic construct
  misc_feature 1..22: note = chemically synthesized
  source 1..22: mol_type = other DNA
gacttttgaaaccccatacaag

SEQ ID NO: 71639 - DNA, 22 bp, synthetic construct
  misc_feature 1..22: note = chemically synthesized
  source 1..22: mol_type = other DNA
ttgaaaccccatacaagattga

SEQ ID NO: 71640 - DNA, 22 bp, synthetic construct
  misc_feature 1..22: note = chemically synthesized
  source 1..22: mol_type = other DNA
tgaaaccccatacaagattgac

SEQ ID NO: 71641 - DNA, 22 bp, synthetic construct
  misc_feature 1..22: note = chemically synthesized
  source 1..22: mol_type = other DNA
gaaaccccatacaagattgaca

SEQ ID NO: 71642 - DNA, 22 bp, synthetic construct
  misc_feature 1..22: note = chemically synthesized
  source 1..22: mol_type = other DNA
aaaccccatacaagattgacaa

SEQ ID NO: 71643 - DNA, 22 bp, synthetic construct
  misc_feature 1..22: note = chemically synthesized
  source 1..22: mol_type = other DNA
acaatttgggaagacatctctc

SEQ ID NO: 71644 - DNA, 22 bp, synthetic construct
  misc_feature 1..22: note = chemically synthesized
  source 1..22: mol_type = other DNA
gggaagacatctctctgtgtga

SEQ ID NO: 71645 - DNA, 22 bp, synthetic construct
  misc_feature 1..22: note = chemically synthesized
  source 1..22: mol_type = other DNA
ggaagacatctctctgtgtgat

SEQ ID NO: 71646 - DNA, 22 bp, synthetic construct
  misc_feature 1..22: note = chemically synthesized
  source 1..22: mol_type = other DNA
tctgtgtgatgagtcaagatca

SEQ ID NO: 71647 - DNA, 22 bp, synthetic construct
  misc_feature 1..22: note = chemically synthesized
  source 1..22: mol_type = other DNA
tgtgtgatgagtcaagatcatg

SEQ ID NO: 71648 - DNA, 22 bp, synthetic construct
  misc_feature 1..22: note = chemically synthesized
  source 1..22: mol_type = other DNA
tgtgatgagtcaagatcatggt

SEQ ID NO: 71649 - DNA, 22 bp, synthetic construct
  misc_feature 1..22: note = chemically synthesized
  source 1..22: mol_type = other DNA
tccatgaatggcagaagcaggg

SEQ ID NO: 71650 - DNA, 22 bp, synthetic construct
  misc_feature 1..22: note = chemically synthesized
  source 1..22: mol_type = other DNA
acaaatctgccaggggttctca

SEQ ID NO: 71651 - DNA, 22 bp, synthetic construct
  misc_feature 1..22: note = chemically synthesized
  source 1..22: mol_type = other DNA
ccaggggttctcactgtgtcct

SEQ ID NO: 71652 - DNA, 22 bp, synthetic construct
  misc_feature 1..22: note = chemically synthesized
  source 1..22: mol_type = other DNA
tcactgtgtcctctctgcagag

SEQ ID NO: 71653 - DNA, 22 bp, synthetic construct
  misc_feature 1..22: note = chemically synthesized
  source 1..22: mol_type = other DNA
actgtgtcctctctgcagagtg

SEQ ID NO: 71654 - DNA, 22 bp, synthetic construct
  misc_feature 1..22: note = chemically synthesized
  source 1..22: mol_type = other DNA
tgtcctctctgcagagtggaac

SEQ ID NO: 71655 - DNA, 22 bp, synthetic construct
  misc_feature 1..22: note = chemically synthesized
  source 1..22: mol_type = other DNA
tctgcagagtggaacttcagat

SEQ ID NO: 71656 - DNA, 22 bp, synthetic construct
  misc_feature 1..22: note = chemically synthesized
  source 1..22: mol_type = other DNA
tgcagagtggaacttcagattg

SEQ ID NO: 71657 - DNA, 22 bp, synthetic construct
  misc_feature 1..22: note = chemically synthesized
  source 1..22: mol_type = other DNA
cagagtggaacttcagattgca

SEQ ID NO: 71658 - DNA, 22 bp, synthetic construct
  misc_feature 1..22: note = chemically synthesized
  source 1..22: mol_type = other DNA
cagattgcagagagataaattg

SEQ ID NO: 71659 - DNA, 22 bp, synthetic construct
  misc_feature 1..22: note = chemically synthesized
  source 1..22: mol_type = other DNA
agattgcagagagataaattgg

SEQ ID NO: 71660 - DNA, 22 bp, synthetic construct
  misc_feature 1..22: note = chemically synthesized
  source 1..22: mol_type = other DNA
cagagagataaattggttgcct

SEQ ID NO: 71661 - DNA, 22 bp, synthetic construct
  misc_feature 1..22: note = chemically synthesized
  source 1..22: mol_type = other DNA
gttgcctgacatgagcacagac

SEQ ID NO: 71662 - DNA, 22 bp, synthetic construct
  misc_feature 1..22: note = chemically synthesized
  source 1..22: mol_type = other DNA
cctgacatgagcacagactaga

SEQ ID NO: 71663 - DNA, 22 bp, synthetic construct
  misc_feature 1..22: note = chemically synthesized
  source 1..22: mol_type = other DNA
acatgagcacagactagaggac

SEQ ID NO: 71664 - DNA, 22 bp, synthetic construct
  misc_feature 1..22: note = chemically synthesized
  source 1..22: mol_type = other DNA
gaggacagagtcccagccactt

SEQ ID NO: 71665 - DNA, 22 bp, synthetic construct
  misc_feature 1..22: note = chemically synthesized
  source 1..22: mol_type = other DNA
ggatggaggagaccaaatacag

SEQ ID NO: 71666 - DNA, 22 bp, synthetic construct
  misc_feature 1..22: note = chemically synthesized
  source 1..22: mol_type = other DNA
gatggaggagaccaaatacagg

SEQ ID NO: 71667 - DNA, 22 bp, synthetic construct
  misc_feature 1..22: note = chemically synthesized
  source 1..22: mol_type = other DNA
tttttactttcccaagcctttt

SEQ ID NO: 71668 - DNA, 22 bp, synthetic construct
  misc_feature 1..22: note = chemically synthesized
  source 1..22: mol_type = other DNA
ttactttcccaagccttttgtg

SEQ ID NO: 71669 - DNA, 22 bp, synthetic construct
  misc_feature 1..22: note = chemically synthesized
  source 1..22: mol_type = other DNA
tactttcccaagccttttgtgg

SEQ ID NO: 71670 - DNA, 22 bp, synthetic construct
  misc_feature 1..22: note = chemically synthesized
  source 1..22: mol_type = other DNA
actttcccaagccttttgtggg

SEQ ID NO: 71671 - DNA, 22 bp, synthetic construct
  misc_feature 1..22: note = chemically synthesized
  source 1..22: mol_type = other DNA
ctttcccaagccttttgtgggc

SEQ ID NO: 71672 - DNA, 22 bp, synthetic construct
  misc_feature 1..22: note = chemically synthesized
  source 1..22: mol_type = other DNA
tcccaagccttttgtgggctgt

SEQ ID NO: 71673 - DNA, 22 bp, synthetic construct
  misc_feature 1..22: note = chemically synthesized
  source 1..22: mol_type = other DNA
cccaagccttttgtgggctgtt

SEQ ID NO: 71674 - DNA, 22 bp, synthetic construct
  misc_feature 1..22: note = chemically synthesized
  source 1..22: mol_type = other DNA
ccaagccttttgtgggctgttc

SEQ ID NO: 71675 - DNA, 22 bp, synthetic construct
  misc_feature 1..22: note = chemically synthesized
  source 1..22: mol_type = other DNA
ttgtgggctgttcagattatta

SEQ ID NO: 71676 - DNA, 22 bp, synthetic construct
  misc_feature 1..22: note = chemically synthesized
  source 1..22: mol_type = other DNA
tgtgggctgttcagattattat

SEQ ID NO: 71677 - DNA, 22 bp, synthetic construct
  misc_feature 1..22: note = chemically synthesized
  source 1..22: mol_type = other DNA
gtgggctgttcagattattatt

SEQ ID NO: 71678 - DNA, 22 bp, synthetic construct
  misc_feature 1..22: note = chemically synthesized
  source 1..22: mol_type = other DNA
tgggctgttcagattattatta

SEQ ID NO: 71679 - DNA, 22 bp, synthetic construct
  misc_feature 1..22: note = chemically synthesized
  source 1..22: mol_type = other DNA
ttcagattattattattattat

SEQ ID NO: 71680 - DNA, 22 bp, synthetic construct
  misc_feature 1..22: note = chemically synthesized
  source 1..22: mol_type = other DNA
agattattattattattattat

SEQ ID NO: 71681 - DNA, 22 bp, synthetic construct
  misc_feature 1..22: note = chemically synthesized
  source 1..22: mol_type = other DNA
ttattattattattattattat

SEQ ID NO: 71682 - DNA, 22 bp, synthetic construct
  misc_feature 1..22: note = chemically synthesized
  source 1..22: mol_type = other DNA
ttattattattattattattat

SEQ ID NO: 71683 - DNA, 22 bp, synthetic construct
  misc_feature 1..22: note = chemically synthesized
  source 1..22: mol_type = other DNA
ttattattattattattattat

SEQ ID NO: 71684 - DNA, 22 bp, synthetic construct
  misc_feature 1..22: note = chemically synthesized
  source 1..22: mol_type = other DNA
ttattattattattattattat

SEQ ID NO: 71685 - DNA, 22 bp, synthetic construct
  misc_feature 1..22: note = chemically synthesized
  source 1..22: mol_type = other DNA
ttattattattattattattat

SEQ ID NO: 71686 - DNA, 22 bp, synthetic construct
  misc_feature 1..22: note = chemically synthesized
  source 1..22: mol_type = other DNA
ttattattattattattattat

SEQ ID NO: 71687 - DNA, 22 bp, synthetic construct
  misc_feature 1..22: note = chemically synthesized
  source 1..22: mol_type = other DNA
ttattattattattattattat

SEQ ID NO: 71688 - DNA, 22 bp, synthetic construct
  misc_feature 1..22: note = chemically synthesized
  source 1..22: mol_type = other DNA
ttattattattattattattat

SEQ ID NO: 71689 - DNA, 22 bp, synthetic construct
  misc_feature 1..22: note = chemically synthesized
  source 1..22: mol_type = other DNA
ttattattattattattattgt

SEQ ID NO: 71690 - DNA, 22 bp, synthetic construct
  misc_feature 1..22: note = chemically synthesized
  source 1..22: mol_type = other DNA
ttattattattattattgttga

SEQ ID NO: 71691 - DNA, 22 bp, synthetic construct
  misc_feature 1..22: note = chemically synthesized
  source 1..22: mol_type = other DNA
ttattattattattgttgagat

SEQ ID NO: 71692 - DNA, 22 bp, synthetic construct
  misc_feature 1..22: note = chemically synthesized
  source 1..22: mol_type = other DNA
ttattattattgttgagatgga

SEQ ID NO: 71693 - DNA, 22 bp, synthetic construct
  misc_feature 1..22: note = chemically synthesized
  source 1..22: mol_type = other DNA
ttattattgttgagatggagtc

SEQ ID NO: 71694 - DNA, 22 bp, synthetic construct
  misc_feature 1..22: note = chemically synthesized
  source 1..22: mol_type = other DNA
ttattgttgagatggagtctca

SEQ ID NO: 71695 - DNA, 22 bp, synthetic construct
  misc_feature 1..22: note = chemically synthesized
  source 1..22: mol_type = other DNA
ttgttgagatggagtctcactc

SEQ ID NO: 71696 - DNA, 22 bp, synthetic construct
  misc_feature 1..22: note = chemically synthesized
  source 1..22: mol_type = other DNA
ttgagatggagtctcactctat

SEQ ID NO: 71697 - DNA, 22 bp, synthetic construct
  misc_feature 1..22: note = chemically synthesized
  source 1..22: mol_type = other DNA
agatggagtctcactctattgc

SEQ ID NO: 71698 - DNA, 22 bp, synthetic construct
  misc_feature 1..22: note = chemically synthesized
  source 1..22: mol_type = other DNA
actctattgcccaggctggagt

SEQ ID NO: 71699 - DNA, 22 bp, synthetic construct
  misc_feature 1..22: note = chemically synthesized
  source 1..22: mol_type = other DNA
tattgcccaggctggagtgcaa

SEQ ID NO: 71700 - DNA, 22 bp, synthetic construct
  misc_feature 1..22: note = chemically synthesized
  source 1..22: mol_type = other DNA
ttgcccaggctggagtgcaatg

SEQ ID NO: 71701 - DNA, 22 bp, synthetic construct
  misc_feature 1..22: note = chemically synthesized
  source 1..22: mol_type = other DNA
cccaggctggagtgcaatggca

SEQ ID NO: 71702 - DNA, 22 bp, synthetic construct
  misc_feature 1..22: note = chemically synthesized
  source 1..22: mol_type = other DNA
gagtgcaatggcacgatcttgg

SEQ ID NO: 71703 - DNA, 22 bp, synthetic construct
  misc_feature 1..22: note = chemically synthesized
  source 1..22: mol_type = other DNA
ggctcactgcaacctctacctc

SEQ ID NO: 71704 - DNA, 22 bp, synthetic construct
  misc_feature 1..22: note = chemically synthesized
  source 1..22: mol_type = other DNA
gctcactgcaacctctacctcc

SEQ ID NO: 71705 - DNA, 22 bp, synthetic construct
  misc_feature 1..22: note = chemically synthesized
  source 1..22: mol_type = other DNA
actgcaacctctacctcccggg

SEQ ID NO: 71706 - DNA, 22 bp, synthetic construct
  misc_feature 1..22: note = chemically synthesized
  source 1..22: mol_type = other DNA
caacctctacctcccgggttca

SEQ ID NO: 71707 - DNA, 22 bp, synthetic construct
  misc_feature 1..22: note = chemically synthesized
  source 1..22: mol_type = other DNA
tacctcccgggttcaagtggtt

SEQ ID NO: 71708 - DNA, 22 bp, synthetic construct
  misc_feature 1..22: note = chemically synthesized
  source 1..22: mol_type = other DNA
cctcccgggttcaagtggttct

SEQ ID NO: 71709 - DNA, 22 bp, synthetic construct
  misc_feature 1..22: note = chemically synthesized
  source 1..22: mol_type = other DNA
ccgggttcaagtggttctcctg

SEQ ID NO: 71710 - DNA, 22 bp, synthetic construct
  misc_feature 1..22: note = chemically synthesized
  source 1..22: mol_type = other DNA
aagtggttctcctgcctcagcc

SEQ ID NO: 71711 - DNA, 22 bp, synthetic construct
  misc_feature 1..22: note = chemically synthesized
  source 1..22: mol_type = other DNA
tcctgcctcagcctcctgagtg

SEQ ID NO: 71712 - DNA, 22 bp, synthetic construct
  misc_feature 1..22: note = chemically synthesized
  source 1..22: mol_type = other DNA
ctgcctcagcctcctgagtggc

SEQ ID NO: 71713 - DNA, 22 bp, synthetic construct
  misc_feature 1..22: note = chemically synthesized
  source 1..22: mol_type = other DNA
cctcagcctcctgagtggctgg

SEQ ID NO: 71714 - DNA, 22 bp, synthetic construct
  misc_feature 1..22: note = chemically synthesized
  source 1..22: mol_type = other DNA
agcctcctgagtggctgggatt

SEQ ID NO: 71715 - DNA, 22 bp, synthetic construct
  misc_feature 1..22: note = chemically synthesized
  source 1..22: mol_type = other DNA
ctgagtggctgggattacaggt

SEQ ID NO: 71716 - DNA, 22 bp, synthetic construct
  misc_feature 1..22: note = chemically synthesized
  source 1..22: mol_type = other DNA
agtggctgggattacaggtgcg

SEQ ID NO: 71717 - DNA, 22 bp, synthetic construct
  misc_feature 1..22: note = chemically synthesized
  source 1..22: mol_type = other DNA
ggattacaggtgcgtaccacct

SEQ ID NO: 71718 - DNA, 22 bp, synthetic construct
  misc_feature 1..22: note = chemically synthesized
  source 1..22: mol_type = other DNA
caggtgcgtaccacctggctaa

SEQ ID NO: 71719 - DNA, 22 bp, synthetic construct
  misc_feature 1..22: note = chemically synthesized
  source 1..22: mol_type = other DNA
gctaatttttgtatttttagta

SEQ ID NO: 71720 - DNA, 22 bp, synthetic construct
  misc_feature 1..22: note = chemically synthesized
  source 1..22: mol_type = other DNA
atttttgtatttttagtagaga

SEQ ID NO: 71721 - DNA, 22 bp, synthetic construct
  misc_feature 1..22: note = chemically synthesized
  source 1..22: mol_type = other DNA
ttgtatttttagtagagacggg

SEQ ID NO: 71722 - DNA, 22 bp, synthetic construct
  misc_feature 1..22: note = chemically synthesized
  source 1..22: mol_type = other DNA
tgtatttttagtagagacgggg

SEQ ID NO: 71723 - DNA, 22 bp, synthetic construct
  misc_feature 1..22: note = chemically synthesized
  source 1..22: mol_type = other DNA
gtatttttagtagagacggggt

SEQ ID NO: 71724 - DNA, 22 bp, synthetic construct
  misc_feature 1..22: note = chemically synthesized
  source 1..22: mol_type = other DNA
tatttttagtagagacggggtt

SEQ ID NO: 71725 - DNA, 22 bp, synthetic construct
  misc_feature 1..22: note = chemically synthesized
  source 1..22: mol_type = other DNA
ttagtagagacggggtttcacc

SEQ ID NO: 71726 - DNA, 22 bp, synthetic construct
  misc_feature 1..22: note = chemically synthesized
  source 1..22: mol_type = other DNA
tagtagagacggggtttcacca

SEQ ID NO: 71727 - DNA, 22 bp, synthetic construct
  misc_feature 1..22: note = chemically synthesized
  source 1..22: mol_type = other DNA
agtagagacggggtttcaccat

SEQ ID NO: 71728 - DNA, 22 bp, synthetic construct
  misc_feature 1..22: note = chemically synthesized
  source 1..22: mol_type = other DNA
gtagagacggggtttcaccatg

SEQ ID NO: 71729 - DNA, 22 bp, synthetic construct
  misc_feature 1..22: note = chemically synthesized
  source 1..22: mol_type = other DNA
caccatgttggtcaggctggtc

SEQ ID NO: 71730 - DNA, 22 bp, synthetic construct
  misc_feature 1..22: note = chemically synthesized
  source 1..22: mol_type = other DNA
accatgttggtcaggctggtct

SEQ ID NO: 71731 - DNA, 22 bp, synthetic construct
  misc_feature 1..22: note = chemically synthesized
  source 1..22: mol_type = other DNA
gtcaggctggtctcgaactcct

SEQ ID NO: 71732 - DNA, 22 bp, synthetic construct
  misc_feature 1..22: note = chemically synthesized
  source 1..22: mol_type = other DNA
gtctcgaactcctgacctcatg

SEQ ID NO: 71733 - DNA, 22 bp, synthetic construct
  misc_feature 1..22: note = chemically synthesized
  source 1..22: mol_type = other DNA
gaactcctgacctcatgagcca

SEQ ID NO: 71734 - DNA, 22 bp, synthetic construct
  misc_feature 1..22: note = chemically synthesized
  source 1..22: mol_type = other DNA
ctgacctcatgagccacctgcc

SEQ ID NO: 71735 - DNA, 22 bp, synthetic construct
  misc_feature 1..22: note = chemically synthesized
  source 1..22: mol_type = other DNA
acctcatgagccacctgcctcg

SEQ ID NO: 71736 - DNA, 22 bp, synthetic construct
  misc_feature 1..22: note = chemically synthesized
  source 1..22: mol_type = other DNA
atgagccacctgcctcggcctc

SEQ ID NO: 71737 - DNA, 22 bp, synthetic construct
  misc_feature 1..22: note = chemically synthesized
  source 1..22: mol_type = other DNA
cctcggcctcccaaagtgctgg

SEQ ID NO: 71738 - DNA, 22 bp, synthetic construct
  misc_feature 1..22: note = chemically synthesized
  source 1..22: mol_type = other DNA
ggcctcccaaagtgctgggatt

SEQ ID NO: 71739 - DNA, 22 bp, synthetic construct
  misc_feature 1..22: note = chemically synthesized
  source 1..22: mol_type = other DNA
ccaaagtgctgggattacaggt

SEQ ID NO: 71740 - DNA, 22 bp, synthetic construct
  misc_feature 1..22: note = chemically synthesized
  source 1..22: mol_type = other DNA
ggattacaggtgtaagccaccg

SEQ ID NO: 71741 - DNA, 22 bp, synthetic construct
  misc_feature 1..22: note = chemically synthesized
  source 1..22: mol_type = other DNA
caggtgtaagccaccgcgcccg

SEQ ID NO: 71742 - DNA, 22 bp, synthetic construct
  misc_feature 1..22: note = chemically synthesized
  source 1..22: mol_type = other DNA
ttacactgtataaaaaaggtct

SEQ ID NO: 71743 - DNA, 22 bp, synthetic construct
  misc_feature 1..22: note = chemically synthesized
  source 1..22: mol_type = other DNA
cactgtataaaaaaggtctgtt

SEQ ID NO: 71744 - DNA, 22 bp, synthetic construct
  misc_feature 1..22: note = chemically synthesized
  source 1..22: mol_type = other DNA
tataaaaaaggtctgttagaat

SEQ ID NO: 71745 - DNA, 22 bp, synthetic construct
  misc_feature 1..22: note = chemically synthesized
  source 1..22: mol_type = other DNA
ttagaattggggtccatgatgg

SEQ ID NO: 71746 - DNA, 22 bp, synthetic construct
  misc_feature 1..22: note = chemically synthesized
  source 1..22: mol_type = other DNA
gaattggggtccatgatgggag

SEQ ID NO: 71747 - DNA, 22 bp, synthetic construct
  misc_feature 1..22: note = chemically synthesized
  source 1..22: mol_type = other DNA
gggtccatgatgggagagaaag

SEQ ID NO: 71748 - DNA, 22 bp, synthetic construct
  misc_feature 1..22: note = chemically synthesized
  source 1..22: mol_type = other DNA
aaagcccctgcagcacccagca

SEQ ID NO: 71749 - DNA, 22 bp, synthetic construct
  misc_feature 1..22: note = chemically synthesized
  source 1..22: mol_type = other DNA
cagcacccagcatccagcatgt

SEQ ID NO: 71750 - DNA, 22 bp, synthetic construct
  misc_feature 1..22: note = chemically synthesized
  source 1..22: mol_type = other DNA
aatatcagcctgtttgagaaat

SEQ ID NO: 71751 - DNA, 22 bp, synthetic construct
  misc_feature 1..22: note = chemically synthesized
  source 1..22: mol_type = other DNA
tttgagaaataattgtttcaaa

SEQ ID NO: 71752 - DNA, 22 bp, synthetic construct
  misc_feature 1..22: note = chemically synthesized
  source 1..22: mol_type = other DNA
gagaaataattgtttcaaaaac

SEQ ID NO: 71753 - DNA, 22 bp, synthetic construct
  misc_feature 1..22: note = chemically synthesized
  source 1..22: mol_type = other DNA
agaaataattgtttcaaaaacc

SEQ ID NO: 71754 - DNA, 22 bp, synthetic construct
  misc_feature 1..22: note = chemically synthesized
  source 1..22: mol_type = other DNA
tttcaaaaaccagtgatcattt

SEQ ID NO: 71755 - DNA, 22 bp, synthetic construct
  misc_feature 1..22: note = chemically synthesized
  source 1..22: mol_type = other DNA
caaaaaccagtgatcatttaaa

SEQ ID NO: 71756 - DNA, 22 bp, synthetic construct
  misc_feature 1..22: note = chemically synthesized
  source 1..22: mol_type = other DNA
aaaaaccagtgatcatttaaag

SEQ ID NO: 71757 - DNA, 22 bp, synthetic construct
  misc_feature 1..22: note = chemically synthesized
  source 1..22: mol_type = other DNA
aaagaaaactcttaggcaagga

SEQ ID NO: 71758 - DNA, 22 bp, synthetic construct
  misc_feature 1..22: note = chemically synthesized
  source 1..22: mol_type = other DNA
aagaaaactcttaggcaaggag

SEQ ID NO: 71759 - DNA, 22 bp, synthetic construct
  misc_feature 1..22: note = chemically synthesized
  source 1..22: mol_type = other DNA
ttaggcaaggagtgcaatcttg

SEQ ID NO: 71760 - DNA, 22 bp, synthetic construct
  misc_feature 1..22: note = chemically synthesized
  source 1..22: mol_type = other DNA
aggcaaggagtgcaatcttgga

SEQ ID NO: 71761 - DNA, 22 bp, synthetic construct
  misc_feature 1..22: note = chemically synthesized
  source 1..22: mol_type = other DNA
ggcaaggagtgcaatcttggaa

SEQ ID NO: 71762 - DNA, 22 bp, synthetic construct
  misc_feature 1..22: note = chemically synthesized
  source 1..22: mol_type = other DNA
ggaatctgctgaggtctaactg

SEQ ID NO: 71763 - DNA, 22 bp, synthetic construct
  misc_feature 1..22: note = chemically synthesized
  source 1..22: mol_type = other DNA
gaatctgctgaggtctaactga

SEQ ID NO: 71764 - DNA, 22 bp, synthetic construct
  misc_feature 1..22: note = chemically synthesized
  source 1..22: mol_type = other DNA
ctgaggtctaactgagtgcccc

SEQ ID NO: 71765 - DNA, 22 bp, synthetic construct
  misc_feature 1..22: note = chemically synthesized
  source 1..22: mol_type = other DNA
aggtctaactgagtgccccaaa

SEQ ID NO: 71766 - DNA, 22 bp, synthetic construct
  misc_feature 1..22: note = chemically synthesized
  source 1..22: mol_type = other DNA
actgagtgccccaaaccttggc

SEQ ID NO: 71767 - DNA, 22 bp, synthetic construct
  misc_feature 1..22: note = chemically synthesized
  source 1..22: mol_type = other DNA
agtgccccaaaccttggcagca

SEQ ID NO: 71768 - DNA, 22 bp, synthetic construct
  misc_feature 1..22: note = chemically synthesized
  source 1..22: mol_type = other DNA
ggcagcatattttctgggcact

SEQ ID NO: 71769 - DNA, 22 bp, synthetic construct
  misc_feature 1..22: note = chemically synthesized
  source 1..22: mol_type = other DNA
gcagcatattttctgggcactt

SEQ ID NO: 71770 - DNA, 22 bp, synthetic construct
  misc_feature 1..22: note = chemically synthesized
  source 1..22: mol_type = other DNA
tctgggcacttttgcttggagt

SEQ ID NO: 71771 - DNA, 22 bp, synthetic construct
  misc_feature 1..22: note = chemically synthesized
  source 1..22: mol_type = other DNA
ctgggcacttttgcttggagtt

SEQ ID NO: 71772 - DNA, 22 bp, synthetic construct
  misc_feature 1..22: note = chemically synthesized
  source 1..22: mol_type = other DNA
tgggcacttttgcttggagttt

SEQ ID NO: 71773 - DNA, 22 bp, synthetic construct
  misc_feature 1..22: note = chemically synthesized
  source 1..22: mol_type = other DNA
ggcacttttgcttggagtttcc

SEQ ID NO: 71774 - DNA, 22 bp, synthetic construct
  misc_feature 1..22: note = chemically synthesized
  source 1..22: mol_type = other DNA
ttgcttggagtttccaagagca

SEQ ID NO: 71775 - DNA, 22 bp, synthetic construct
  misc_feature 1..22: note = chemically synthesized
  source 1..22: mol_type = other DNA
tgcttggagtttccaagagcat

SEQ ID NO: 71776 - DNA, 22 bp, synthetic construct
  misc_feature 1..22: note = chemically synthesized
  source 1..22: mol_type = other DNA
gcttggagtttccaagagcatt

SEQ ID NO: 71777 - DNA, 22 bp, synthetic construct
  misc_feature 1..22: note = chemically synthesized
  source 1..22: mol_type = other DNA
cttggagtttccaagagcattc

SEQ ID NO: 71778 - DNA, 22 bp, synthetic construct
  misc_feature 1..22: note = chemically synthesized
  source 1..22: mol_type = other DNA
ggagtttccaagagcattcaga

SEQ ID NO: 71779 - DNA, 22 bp, synthetic construct
  misc_feature 1..22: note = chemically synthesized
  source 1..22: mol_type = other DNA
gagtttccaagagcattcagat

SEQ ID NO: 71780 - DNA, 22 bp, synthetic construct
  misc_feature 1..22: note = chemically synthesized
  source 1..22: mol_type = other DNA
ccaagagcattcagattaaaac

SEQ ID NO: 71781 - DNA, 22 bp, synthetic construct
  misc_feature 1..22: note = chemically synthesized
  source 1..22: mol_type = other DNA
caagagcattcagattaaaacc

SEQ ID NO: 71782 - DNA, 22 bp, synthetic construct
  misc_feature 1..22: note = chemically synthesized
  source 1..22: mol_type = other DNA
agattaaaaccaagcccttcaa

SEQ ID NO: 71783 - DNA, 22 bp, synthetic construct
  misc_feature 1..22: note = chemically synthesized
  source 1..22: mol_type = other DNA
aaaccaagcccttcaagtggtc

SEQ ID NO: 71784 - DNA, 22 bp, synthetic construct
  misc_feature 1..22: note = chemically synthesized
  source 1..22: mol_type = other DNA
caagtggtcaggaatatctttc

SEQ ID NO: 71785 - DNA, 22 bp, synthetic construct
  misc_feature 1..22: note = chemically synthesized
  source 1..22: mol_type = other DNA
aagtggtcaggaatatctttca

SEQ ID NO: 71786 - DNA, 22 bp, synthetic construct
  misc_feature 1..22: note = chemically synthesized
  source 1..22: mol_type = other DNA
tcaggttttgtatgcgttgaca

SEQ ID NO: 71787 - DNA, 22 bp, synthetic construct
  misc_feature 1..22: note = chemically synthesized
  source 1..22: mol_type = other DNA
caggttttgtatgcgttgacat

SEQ ID NO: 71788 - DNA, 22 bp, synthetic construct
  misc_feature 1..22: note = chemically synthesized
  source 1..22: mol_type = other DNA
aggttttgtatgcgttgacatg

SEQ ID NO: 71789 - DNA, 22 bp, synthetic construct
  misc_feature 1..22: note = chemically synthesized
  source 1..22: mol_type = other DNA
tgtatgcgttgacatgattttt

SEQ ID NO: 71790 - DNA, 22 bp, synthetic construct
  misc_feature 1..22: note = chemically synthesized
  source 1..22: mol_type = other DNA
gtatgcgttgacatgatttttt

SEQ ID NO: 71791 - DNA, 22 bp, synthetic construct
  misc_feature 1..22: note = chemically synthesized
  source 1..22: mol_type = other DNA
tatgcgttgacatgattttttt

SEQ ID NO: 71792 - DNA, 22 bp, synthetic construct
  misc_feature 1..22: note = chemically synthesized
  source 1..22: mol_type = other DNA
acatgatttttttttttttttg

SEQ ID NO: 71793 - DNA, 22 bp, synthetic construct
  misc_feature 1..22: note = chemically synthesized
  source 1..22: mol_type = other DNA
ttttttttttttgatagtgagg

SEQ ID NO: 71794 - DNA, 22 bp, synthetic construct
  misc_feature 1..22: note = chemically synthesized
  source 1..22: mol_type = other DNA
tttttttttttgatagtgaggt

SEQ ID NO: 71795 - DNA, 22 bp, synthetic construct
  misc_feature 1..22: note = chemically synthesized
  source 1..22: mol_type = other DNA
ttttttttttgatagtgaggtt

SEQ ID NO: 71796 - DNA, 22 bp, synthetic construct
  misc_feature 1..22: note = chemically synthesized
  source 1..22: mol_type = other DNA
tttttttttgatagtgaggtta

SEQ ID NO: 71797 - DNA, 22 bp, synthetic construct
  misc_feature 1..22: note = chemically synthesized
  source 1..22: mol_type = other DNA
ttttttttgatagtgaggttaa

SEQ ID NO: 71798 - DNA, 22 bp, synthetic construct
  misc_feature 1..22: note = chemically synthesized
  source 1..22: mol_type = other DNA
tttttttgatagtgaggttaac

SEQ ID NO: 71799 - DNA, 22 bp, synthetic construct
  misc_feature 1..22: note = chemically synthesized
  source 1..22: mol_type = other DNA
ttttttgatagtgaggttaaca

SEQ ID NO: 71800 - DNA, 22 bp, synthetic construct
  misc_feature 1..22: note = chemically synthesized
  source 1..22: mol_type = other DNA
tttttgatagtgaggttaacat

SEQ ID NO: 71801 - DNA, 22 bp, synthetic construct
  misc_feature 1..22: note = chemically synthesized
  source 1..22: mol_type = other DNA
ttttgatagtgaggttaacatt

SEQ ID NO: 71802 - DNA, 22 bp, synthetic construct
  misc_feature 1..22: note = chemically synthesized
  source 1..22: mol_type = other DNA
tttgatagtgaggttaacattg

SEQ ID NO: 71803 - DNA, 22 bp, synthetic construct
  misc_feature 1..22: note = chemically synthesized
  source 1..22: mol_type = other DNA
ttgatagtgaggttaacattga

SEQ ID NO: 71804 - DNA, 22 bp, synthetic construct
  misc_feature 1..22: note = chemically synthesized
  source 1..22: mol_type = other DNA
tgatagtgaggttaacattgac

SEQ ID NO: 71805 - DNA, 22 bp, synthetic construct
  misc_feature 1..22: note = chemically synthesized
  source 1..22: mol_type = other DNA
gatagtgaggttaacattgacg

SEQ ID NO: 71806 - DNA, 22 bp, synthetic construct
  misc_feature 1..22: note = chemically synthesized
  source 1..22: mol_type = other DNA
atagtgaggttaacattgacga

SEQ ID NO: 71807 - DNA, 22 bp, synthetic construct
  misc_feature 1..22: note = chemically synthesized
  source 1..22: mol_type = other DNA
acattgacgaagatggctatat

SEQ ID NO: 71808 - DNA, 22 bp, synthetic construct
  misc_feature 1..22: note = chemically synthesized
  source 1..22: mol_type = other DNA
acgaagatggctatatttattc

SEQ ID NO: 71809 - DNA, 22 bp, synthetic construct
  misc_feature 1..22: note = chemically synthesized
  source 1..22: mol_type = other DNA
tatttattcctatttttaaaaa

SEQ ID NO: 71810 - DNA, 22 bp, synthetic construct
  misc_feature 1..22: note = chemically synthesized
  source 1..22: mol_type = other DNA
attcctatttttaaaaattctt

SEQ ID NO: 71811 - DNA, 22 bp, synthetic construct
  misc_feature 1..22: note = chemically synthesized
  source 1..22: mol_type = other DNA
ttcctatttttaaaaattctta

SEQ ID NO: 71812 - DNA, 22 bp, synthetic construct
  misc_feature 1..22: note = chemically synthesized
  source 1..22: mol_type = other DNA
ctatttttaaaaattcttattt

SEQ ID NO: 71813 - DNA, 22 bp, synthetic construct
  misc_feature 1..22: note = chemically synthesized
  source 1..22: mol_type = other DNA
tttttaaaaattcttattttat

SEQ ID NO: 71814 - DNA, 22 bp, synthetic construct
  misc_feature 1..22: note = chemically synthesized
  source 1..22: mol_type = other DNA
ttaaaaattcttattttataat

SEQ ID NO: 71815 - DNA, 22 bp, synthetic construct
  misc_feature 1..22: note = chemically synthesized
  source 1..22: mol_type = other DNA
taaaaattcttattttataatt

SEQ ID NO: 71816 - DNA, 22 bp, synthetic construct
  misc_feature 1..22: note = chemically synthesized
  source 1..22: mol_type = other DNA
aaaaattcttattttataattc

SEQ ID NO: 71817 - DNA, 22 bp, synthetic construct
  misc_feature 1..22: note = chemically synthesized
  source 1..22: mol_type = other DNA
aaaattcttattttataattct

SEQ ID NO: 71818 - DNA, 22 bp, synthetic construct
  misc_feature 1..22: note = chemically synthesized
  source 1..22: mol_type = other DNA
ttattttataattcttatttta

SEQ ID NO: 71819 - DNA, 22 bp, synthetic construct
  misc_feature 1..22: note = chemically synthesized
  source 1..22: mol_type = other DNA
attttataattcttattttata

SEQ ID NO: 71820 - DNA, 22 bp, synthetic construct
  misc_feature 1..22: note = chemically synthesized
  source 1..22: mol_type = other DNA
ttttataattcttattttataa

SEQ ID NO: 71821 - DNA, 22 bp, synthetic construct
  misc_feature 1..22: note = chemically synthesized
  source 1..22: mol_type = other DNA
tataattcttattttataaatc

SEQ ID NO: 71822 - DNA, 22 bp, synthetic construct
  misc_feature 1..22: note = chemically synthesized
  source 1..22: mol_type = other DNA
ataattcttattttataaatca

SEQ ID NO: 71823 - DNA, 22 bp, synthetic construct
  misc_feature 1..22: note = chemically synthesized
  source 1..22: mol_type = other DNA
taattcttattttataaatcag

SEQ ID NO: 71824 - DNA, 22 bp, synthetic construct
  misc_feature 1..22: note = chemically synthesized
  source 1..22: mol_type = other DNA
ttattttataaatcagtgtccc

SEQ ID NO: 71825 - DNA, 22 bp, synthetic construct
  misc_feature 1..22: note = chemically synthesized
  source 1..22: mol_type = other DNA
attttataaatcagtgtccccg

SEQ ID NO: 71826 - DNA, 22 bp, synthetic construct
  misc_feature 1..22: note = chemically synthesized
  source 1..22: mol_type = other DNA
ttttataaatcagtgtccccgg

SEQ ID NO: 71827 - DNA, 22 bp, synthetic construct
  misc_feature 1..22: note = chemically synthesized
  source 1..22: mol_type = other DNA
tataaatcagtgtccccggaag

SEQ ID NO: 71828 - DNA, 22 bp, synthetic construct
  misc_feature 1..22: note = chemically synthesized
  source 1..22: mol_type = other DNA
ataaatcagtgtccccggaagt

SEQ ID NO: 71829 - DNA, 22 bp, synthetic construct
  misc_feature 1..22: note = chemically synthesized
  source 1..22: mol_type = other DNA
taaatcagtgtccccggaagta

SEQ ID NO: 71830 - DNA, 22 bp, synthetic construct
  misc_feature 1..22: note = chemically synthesized
  source 1..22: mol_type = other DNA
gaatggaagtattttgtaggct

SEQ ID NO: 71831 - DNA, 22 bp, synthetic construct
  misc_feature 1..22: note = chemically synthesized
  source 1..22: mol_type = other DNA
tgtaggctgttggttctgttct

SEQ ID NO: 71832 - DNA, 22 bp, synthetic construct
  misc_feature 1..22: note = chemically synthesized
  source 1..22: mol_type = other DNA
gtaggctgttggttctgttctt

SEQ ID NO: 71833 - DNA, 22 bp, synthetic construct
  misc_feature 1..22: note = chemically synthesized
  source 1..22: mol_type = other DNA
taggctgttggttctgttctta

SEQ ID NO: 71834 - DNA, 22 bp, synthetic construct
  misc_feature 1..22: note = chemically synthesized
  source 1..22: mol_type = other DNA
ttggttctgttcttacagtatg

SEQ ID NO: 71835 - DNA, 22 bp, synthetic construct
  misc_feature 1..22: note = chemically synthesized
  source 1..22: mol_type = other DNA
gttctgttcttacagtatgcca

SEQ ID NO: 71836 - DNA, 22 bp, synthetic construct
  misc_feature 1..22: note = chemically synthesized
  source 1..22: mol_type = other DNA
tgttcttacagtatgccacata

SEQ ID NO: 71837 - DNA, 22 bp, synthetic construct
  misc_feature 1..22: note = chemically synthesized
  source 1..22: mol_type = other DNA
ttcttacagtatgccacatagc

SEQ ID NO: 71838 - DNA, 22 bp, synthetic construct
  misc_feature 1..22: note = chemically synthesized
  source 1..22: mol_type = other DNA
ttacagtatgccacatagcttt

SEQ ID NO: 71839 - DNA, 22 bp, synthetic construct
  misc_feature 1..22: note = chemically synthesized
  source 1..22: mol_type = other DNA
acagtatgccacatagctttga

SEQ ID NO: 71840 - DNA, 22 bp, synthetic construct
  misc_feature 1..22: note = chemically synthesized
  source 1..22: mol_type = other DNA
cagtatgccacatagctttgac

SEQ ID NO: 71841 - DNA, 22 bp, synthetic construct
  misc_feature 1..22: note = chemically synthesized
  source 1..22: mol_type = other DNA
tgactccttttggagtatagtg

SEQ ID NO: 71842 - DNA, 22 bp, synthetic construct
  misc_feature 1..22: note = chemically synthesized
  source 1..22: mol_type = other DNA
gactccttttggagtatagtgt

SEQ ID NO: 71843 - DNA, 22 bp, synthetic construct
  misc_feature 1..22: note = chemically synthesized
  source 1..22: mol_type = other DNA
actccttttggagtatagtgtg

SEQ ID NO: 71844 - DNA, 22 bp, synthetic construct
  misc_feature 1..22: note = chemically synthesized
  source 1..22: mol_type = other DNA
cttttggagtatagtgtgaagg

SEQ ID NO: 71845 - DNA, 22 bp, synthetic construct
  misc_feature 1..22: note = chemically synthesized
  source 1..22: mol_type = other DNA
ttggagtatagtgtgaaggaag

SEQ ID NO: 71846 - DNA, 22 bp, synthetic construct
  misc_feature 1..22: note = chemically synthesized
  source 1..22: mol_type = other DNA
tggagtatagtgtgaaggaagc

SEQ ID NO: 71847 - DNA, 22 bp, synthetic construct
  misc_feature 1..22: note = chemically synthesized
  source 1..22: mol_type = other DNA
ggagtatagtgtgaaggaagca

SEQ ID NO: 71848 - DNA, 22 bp, synthetic construct
  misc_feature 1..22: note = chemically synthesized
  source 1..22: mol_type = other DNA
gagtatagtgtgaaggaagcag

SEQ ID NO: 71849 - DNA, 22 bp, synthetic construct
  misc_feature 1..22: note = chemically synthesized
  source 1..22: mol_type = other DNA
gaggaattttgagtctggtgga

SEQ ID NO: 71850 - DNA, 22 bp, synthetic construct
  misc_feature 1..22: note = chemically synthesized
  source 1..22: mol_type = other DNA
aggaattttgagtctggtggaa

SEQ ID NO: 71851 - DNA, 22 bp, synthetic construct
  misc_feature 1..22: note = chemically synthesized
  source 1..22: mol_type = other DNA
tgagtctggtggaagttccaaa

SEQ ID NO: 71852 - DNA, 22 bp, synthetic construct
  misc_feature 1..22: note = chemically synthesized
  source 1..22: mol_type = other DNA
gagtctggtggaagttccaaaa

SEQ ID NO: 71853 - DNA, 22 bp, synthetic construct
  misc_feature 1..22: note = chemically synthesized
  source 1..22: mol_type = other DNA
agtctggtggaagttccaaaat

SEQ ID NO: 71854 - DNA, 22 bp, synthetic construct
  misc_feature 1..22: note = chemically synthesized
  source 1..22: mol_type = other DNA
gtggaagttccaaaataactgg

SEQ ID NO: 71855 - DNA, 22 bp, synthetic construct
  misc_feature 1..22: note = chemically synthesized
  source 1..22: mol_type = other DNA
caaaataactggtgatgcaagc

SEQ ID NO: 71856 - DNA, 22 bp, synthetic construct
  misc_feature 1..22: note = chemically synthesized
  source 1..22: mol_type = other DNA
gtgatgcaagcacaccttcctt

SEQ ID NO: 71857 - DNA, 22 bp, synthetic construct
  misc_feature 1..22: note = chemically synthesized
  source 1..22: mol_type = other DNA
ccttcttcaagagttcatcttg

SEQ ID NO: 71858 - DNA, 22 bp, synthetic construct
  misc_feature 1..22: note = chemically synthesized
  source 1..22: mol_type = other DNA
cttcttcaagagttcatcttga

SEQ ID NO: 71859 - DNA, 22 bp, synthetic construct
  misc_feature 1..22: note = chemically synthesized
  source 1..22: mol_type = other DNA
cttcaagagttcatcttgagtt

SEQ ID NO: 71860 - DNA, 22 bp, synthetic construct
  misc_feature 1..22: note = chemically synthesized
  source 1..22: mol_type = other DNA
ttcaagagttcatcttgagttc

SEQ ID NO: 71861 - DNA, 22 bp, synthetic construct
  misc_feature 1..22: note = chemically synthesized
  source 1..22: mol_type = other DNA
caagagttcatcttgagttcct

SEQ ID NO: 71862 - DNA, 22 bp, synthetic construct
  misc_feature 1..22: note = chemically synthesized
  source 1..22: mol_type = other DNA
aagagttcatcttgagttccta

SEQ ID NO: 71863 - DNA, 22 bp, synthetic construct
  misc_feature 1..22: note = chemically synthesized
  source 1..22: mol_type = other DNA
atcttgagttcctaaccagcag

SEQ ID NO: 71864 - DNA, 22 bp, synthetic construct
  misc_feature 1..22: note = chemically synthesized
  source 1..22: mol_type = other DNA
gagttcctaaccagcagagaaa

SEQ ID NO: 71865 - DNA, 22 bp, synthetic construct
  misc_feature 1..22: note = chemically synthesized
  source 1..22: mol_type = other DNA
agttcctaaccagcagagaaac

SEQ ID NO: 71866 - DNA, 22 bp, synthetic construct
  misc_feature 1..22: note = chemically synthesized
  source 1..22: mol_type = other DNA
ctaaccagcagagaaacaatat

SEQ ID NO: 71867 - DNA, 22 bp, synthetic construct
  misc_feature 1..22: note = chemically synthesized
  source 1..22: mol_type = other DNA
accagcagagaaacaatattat

SEQ ID NO: 71868 - DNA, 22 bp, synthetic construct
  misc_feature 1..22: note = chemically synthesized
  source 1..22: mol_type = other DNA
tatttctttcctctgactgcct

SEQ ID NO: 71869 - DNA, 22 bp, synthetic construct
  misc_feature 1..22: note = chemically synthesized
  source 1..22: mol_type = other DNA
ctttcctctgactgcctaggag

SEQ ID NO: 71870 - DNA, 22 bp, synthetic construct
  misc_feature 1..22: note = chemically synthesized
  source 1..22: mol_type = other DNA
tttcctctgactgcctaggaga

SEQ ID NO: 71871 - DNA, 22 bp, synthetic construct
  misc_feature 1..22: note = chemically synthesized
  source 1..22: mol_type = other DNA
tcctctgactgcctaggagaga

SEQ ID NO: 71872 - DNA, 22 bp, synthetic construct
  misc_feature 1..22: note = chemically synthesized
  source 1..22: mol_type = other DNA
cctctgactgcctaggagagac

SEQ ID NO: 71873 - DNA, 22 bp, synthetic construct
  misc_feature 1..22: note = chemically synthesized
  source 1..22: mol_type = other DNA
ctctgactgcctaggagagaca

SEQ ID NO: 71874 - DNA, 22 bp, synthetic construct
  misc_feature 1..22: note = chemically synthesized
  source 1..22: mol_type = other DNA
tgactgcctaggagagacagta

SEQ ID NO: 71875 - DNA, 22 bp, synthetic construct
  misc_feature 1..22: note = chemically synthesized
  source 1..22: mol_type = other DNA
actgcctaggagagacagtact

SEQ ID NO: 71876 - DNA, 22 bp, synthetic construct
  misc_feature 1..22: note = chemically synthesized
  source 1..22: mol_type = other DNA
cctaggagagacagtactcttc

SEQ ID NO: 71877 - DNA, 22 bp, synthetic construct
  misc_feature 1..22: note = chemically synthesized
  source 1..22: mol_type = other DNA
ggagagacagtactcttcagtt

SEQ ID NO: 71878 - DNA, 22 bp, synthetic construct
  misc_feature 1..22: note = chemically synthesized
  source 1..22: mol_type = other DNA
ttcagtttgcattcccctggag

SEQ ID NO: 71879 - DNA, 22 bp, synthetic construct
  misc_feature 1..22: note = chemically synthesized
  source 1..22: mol_type = other DNA
cagtttgcattcccctggagtt

SEQ ID NO: 71880 - DNA, 22 bp, synthetic construct
  misc_feature 1..22: note = chemically synthesized
  source 1..22: mol_type = other DNA
agtttgcattcccctggagtta

SEQ ID NO: 71881 - DNA, 22 bp, synthetic construct
  misc_feature 1..22: note = chemically synthesized
  source 1..22: mol_type = other DNA
gcattcccctggagttacatta

SEQ ID NO: 71882 - DNA, 22 bp, synthetic construct
  misc_feature 1..22: note = chemically synthesized
  source 1..22: mol_type = other DNA
cattcccctggagttacattaa

SEQ ID NO: 71883 - DNA, 22 bp, synthetic construct
  misc_feature 1..22: note = chemically synthesized
  source 1..22: mol_type = other DNA
ccctggagttacattaagtcat

SEQ ID NO: 71884 - DNA, 22 bp, synthetic construct
  misc_feature 1..22: note = chemically synthesized
  source 1..22: mol_type = other DNA
gagttacattaagtcatggaac

SEQ ID NO: 71885 - DNA, 22 bp, synthetic construct
  misc_feature 1..22: note = chemically synthesized
  source 1..22: mol_type = other DNA
cattaagtcatggaacttctca

SEQ ID NO: 71886 - DNA, 22 bp, synthetic construct
  misc_feature 1..22: note = chemically synthesized
  source 1..22: mol_type = other DNA
agtcatggaacttctcacttcc

SEQ ID NO: 71887 - DNA, 22 bp, synthetic construct
  misc_feature 1..22: note = chemically synthesized
  source 1..22: mol_type = other DNA
ctcacttccagtaaaatccaga

SEQ ID NO: 71888 - DNA, 22 bp, synthetic construct
  misc_feature 1..22: note = chemically synthesized
  source 1..22: mol_type = other DNA
tcacttccagtaaaatccagaa

SEQ ID NO: 71889 - DNA, 22 bp, synthetic construct
  misc_feature 1..22: note = chemically synthesized
  source 1..22: mol_type = other DNA
acttccagtaaaatccagaagc

SEQ ID NO: 71890 - DNA, 22 bp, synthetic construct
  misc_feature 1..22: note = chemically synthesized
  source 1..22: mol_type = other DNA
ccagtaaaatccagaagcagtc

SEQ ID NO: 71891 - DNA, 22 bp, synthetic construct
  misc_feature 1..22: note = chemically synthesized
  source 1..22: mol_type = other DNA
cagtaaaatccagaagcagtca

SEQ ID NO: 71892 - DNA, 22 bp, synthetic construct
  misc_feature 1..22: note = chemically synthesized
  source 1..22: mol_type = other DNA
tctgtttttctatcttagttta

SEQ ID NO: 71893 - DNA, 22 bp, synthetic construct
  misc_feature 1..22: note = chemically synthesized
  source 1..22: mol_type = other DNA
tttttctatcttagtttaaatt

SEQ ID NO: 71894 - DNA, 22 bp, synthetic construct
  misc_feature 1..22: note = chemically synthesized
  source 1..22: mol_type = other DNA
ttctatcttagtttaaattagg

SEQ ID NO: 71895 - DNA, 22 bp, synthetic construct
  misc_feature 1..22: note = chemically synthesized
  source 1..22: mol_type = other DNA
tctatcttagtttaaattagga

SEQ ID NO: 71896 - DNA, 22 bp, synthetic construct
  misc_feature 1..22: note = chemically synthesized
  source 1..22: mol_type = other DNA
ctatcttagtttaaattaggat

SEQ ID NO: 71897 - DNA, 22 bp, synthetic construct
  misc_feature 1..22: note = chemically synthesized
  source 1..22: mol_type = other DNA
tatcttagtttaaattaggata

SEQ ID NO: 71898 - DNA, 22 bp, synthetic construct
  misc_feature 1..22: note = chemically synthesized
  source 1..22: mol_type = other DNA
tcttagtttaaattaggatatc

SEQ ID NO: 71899 - DNA, 22 bp, synthetic construct
  misc_feature 1..22: note = chemically synthesized
  source 1..22: mol_type = other DNA
agtttaaattaggatatcttat

SEQ ID NO: 71900 - DNA, 22 bp, synthetic construct
  misc_feature 1..22: note = chemically synthesized
  source 1..22: mol_type = other DNA
gtttaaattaggatatcttatt

SEQ ID NO: 71901 - DNA, 22 bp, synthetic construct
  misc_feature 1..22: note = chemically synthesized
  source 1..22: mol_type = other DNA
aaattaggatatcttattacga

SEQ ID NO: 71902 - DNA, 22 bp, synthetic construct
  misc_feature 1..22: note = chemically synthesized
  source 1..22: mol_type = other DNA
aattaggatatcttattacgaa

SEQ ID NO: 71903 - DNA, 22 bp, synthetic construct
  misc_feature 1..22: note = chemically synthesized
  source 1..22: mol_type = other DNA
ggatatcttattacgaaccaca

SEQ ID NO: 71904 - DNA, 22 bp, synthetic construct
  misc_feature 1..22: note = chemically synthesized
  source 1..22: mol_type = other DNA
attacgaaccacatggcctttc

SEQ ID NO: 71905 - DNA, 22 bp, synthetic construct
  misc_feature 1..22: note = chemically synthesized
  source 1..22: mol_type = other DNA
ttacgaaccacatggcctttct

SEQ ID NO: 71906 - DNA, 22 bp, synthetic construct
  misc_feature 1..22: note = chemically synthesized
  source 1..22: mol_type = other DNA
cgaaccacatggcctttctttt

SEQ ID NO: 71907 - DNA, 22 bp, synthetic construct
  misc_feature 1..22: note = chemically synthesized
  source 1..22: mol_type = other DNA
tctttttgctttgtattttaaa

SEQ ID NO: 71908 - DNA, 22 bp, synthetic construct
  misc_feature 1..22: note = chemically synthesized
  source 1..22: mol_type = other DNA
ctttttgctttgtattttaaaa

SEQ ID NO: 71909 - DNA, 22 bp, synthetic construct
  misc_feature 1..22: note = chemically synthesized
  source 1..22: mol_type = other DNA
tttttgctttgtattttaaaaa

SEQ ID NO: 71910 - DNA, 22 bp, synthetic construct
  misc_feature 1..22: note = chemically synthesized
  source 1..22: mol_type = other DNA
tttgctttgtattttaaaaaat

SEQ ID NO: 71911 - DNA, 22 bp, synthetic construct
  misc_feature 1..22: note = chemically synthesized
  source 1..22: mol_type = other DNA
ttgctttgtattttaaaaaatg

SEQ ID NO: 71912 - DNA, 22 bp, synthetic construct
  misc_feature 1..22: note = chemically synthesized
  source 1..22: mol_type = other DNA
tgctttgtattttaaaaaatgc

SEQ ID NO: 71913 - DNA, 22 bp, synthetic construct
  misc_feature 1..22: note = chemically synthesized
  source 1..22: mol_type = other DNA
gctttgtattttaaaaaatgct

SEQ ID NO: 71914 - DNA, 22 bp, synthetic construct
  misc_feature 1..22: note = chemically synthesized
  source 1..22: mol_type = other DNA
ctttgtattttaaaaaatgctc

SEQ ID NO: 71915 - DNA, 22 bp, synthetic construct
  misc_feature 1..22: note = chemically synthesized
  source 1..22: mol_type = other DNA
tgtattttaaaaaatgctccca

SEQ ID NO: 71916 - DNA, 22 bp, synthetic construct
  misc_feature 1..22: note = chemically synthesized
  source 1..22: mol_type = other DNA
gtattttaaaaaatgctcccag

SEQ ID NO: 71917 - DNA, 22 bp, synthetic construct
  misc_feature 1..22: note = chemically synthesized
  source 1..22: mol_type = other DNA
tattttaaaaaatgctcccagg

SEQ ID NO: 71918 - DNA, 22 bp, synthetic construct
  misc_feature 1..22: note = chemically synthesized
  source 1..22: mol_type = other DNA
taaaaaatgctcccaggaagta

SEQ ID NO: 71919 - DNA, 22 bp, synthetic construct
  misc_feature 1..22: note = chemically synthesized
  source 1..22: mol_type = other DNA
aaaaaatgctcccaggaagtac

SEQ ID NO: 71920 - DNA, 22 bp, synthetic construct
  misc_feature 1..22: note = chemically synthesized
  source 1..22: mol_type = other DNA
aaaaatgctcccaggaagtact

SEQ ID NO: 71921 - DNA, 22 bp, synthetic construct
  misc_feature 1..22: note = chemically synthesized
  source 1..22: mol_type = other DNA
ccaggaagtacttaagctttat

SEQ ID NO: 71922 - DNA, 22 bp, synthetic construct
  misc_feature 1..22: note = chemically synthesized
  source 1..22: mol_type = other DNA
aagctttatagaatacttttat

SEQ ID NO: 71923 - DNA, 22 bp, synthetic construct
  misc_feature 1..22: note = chemically synthesized
  source 1..22: mol_type = other DNA
agctttatagaatacttttata

SEQ ID NO: 71924 - DNA, 22 bp, synthetic construct
  misc_feature 1..22: note = chemically synthesized
  source 1..22: mol_type = other DNA
tatagaatacttttatatacat

SEQ ID NO: 71925 - DNA, 22 bp, synthetic construct
  misc_feature 1..22: note = chemically synthesized
  source 1..22: mol_type = other DNA
atagaatacttttatatacatg

SEQ ID NO: 71926 - DNA, 22 bp, synthetic construct
  misc_feature 1..22: note = chemically synthesized
  source 1..22: mol_type = other DNA
tagaatacttttatatacatga

SEQ ID NO: 71927 - DNA, 22 bp, synthetic construct
  misc_feature 1..22: note = chemically synthesized
  source 1..22: mol_type = other DNA
ttatatacatgatagaatcaat

SEQ ID NO: 71928 - DNA, 22 bp, synthetic construct
  misc_feature 1..22: note = chemically synthesized
  source 1..22: mol_type = other DNA
tatatacatgatagaatcaatt

SEQ ID NO: 71929 - DNA, 22 bp, synthetic construct
  misc_feature 1..22: note = chemically synthesized
  source 1..22: mol_type = other DNA
atatacatgatagaatcaattt

SEQ ID NO: 71930 - DNA, 22 bp, synthetic construct
  misc_feature 1..22: note = chemically synthesized
  source 1..22: mol_type = other DNA
tatacatgatagaatcaatttt

SEQ ID NO: 71931 - DNA, 22 bp, synthetic construct
  misc_feature 1..22: note = chemically synthesized
  source 1..22: mol_type = other DNA
tccttgtgattctataaattag

SEQ ID NO: 71932 - DNA, 22 bp, synthetic construct
  misc_feature 1..22: note = chemically synthesized
  source 1..22: mol_type = other DNA
ccttgtgattctataaattaga

SEQ ID NO: 71933 - DNA, 22 bp, synthetic construct
  misc_feature 1..22: note = chemically synthesized
  source 1..22: mol_type = other DNA
cttgtgattctataaattagat

SEQ ID NO: 71934 - DNA, 22 bp, synthetic construct
  misc_feature 1..22: note = chemically synthesized
  source 1..22: mol_type = other DNA
gtgattctataaattagataag

SEQ ID NO: 71935 - DNA, 22 bp, synthetic construct
  misc_feature 1..22: note = chemically synthesized
  source 1..22: mol_type = other DNA
tgattctataaattagataaga

SEQ ID NO: 71936 - DNA, 22 bp, synthetic construct
  misc_feature 1..22: note = chemically synthesized
  source 1..22: mol_type = other DNA
tataaattagataagaaaagaa

SEQ ID NO: 71937 - DNA, 22 bp, synthetic construct
  misc_feature 1..22: note = chemically synthesized
  source 1..22: mol_type = other DNA
taaattagataagaaaagaata

SEQ ID NO: 71938 - DNA, 22 bp, synthetic construct
  misc_feature 1..22: note = chemically synthesized
  source 1..22: mol_type = other DNA
gataagaaaagaatagactgaa

SEQ ID NO: 71939 - DNA, 22 bp, synthetic construct
  misc_feature 1..22: note = chemically synthesized
  source 1..22: mol_type = other DNA
aagttgaaaggaatcctagtaa

SEQ ID NO: 71940 - DNA, 22 bp, synthetic construct
  misc_feature 1..22: note = chemically synthesized
  source 1..22: mol_type = other DNA
aaaggaatcctagtaatcactc

SEQ ID NO: 71941 - DNA, 22 bp, synthetic construct
  misc_feature 1..22: note = chemically synthesized
  source 1..22: mol_type = other DNA
gtaatcactcattttagagatc

SEQ ID NO: 71942 - DNA, 22 bp, synthetic construct
  misc_feature 1..22: note = chemically synthesized
  source 1..22: mol_type = other DNA
attttagagatcagaataataa

SEQ ID NO: 71943 - DNA, 22 bp, synthetic construct
  misc_feature 1..22: note = chemically synthesized
  source 1..22: mol_type = other DNA
tagagatcagaataataagggc

SEQ ID NO: 71944 - DNA, 22 bp, synthetic construct
  misc_feature 1..22: note = chemically synthesized
  source 1..22: mol_type = other DNA
agagatcagaataataagggcc

SEQ ID NO: 71945 - DNA, 22 bp, synthetic construct
  misc_feature 1..22: note = chemically synthesized
  source 1..22: mol_type = other DNA
gagatcagaataataagggccc

SEQ ID NO: 71946 - DNA, 22 bp, synthetic construct
  misc_feature 1..22: note = chemically synthesized
  source 1..22: mol_type = other DNA
agtgaagtacctaagatcacag

SEQ ID NO: 71947 - DNA, 22 bp, synthetic construct
  misc_feature 1..22: note = chemically synthesized
  source 1..22: mol_type = other DNA
agatcacagtgtgaaaaaaaca

SEQ ID NO: 71948 - skipped

SEQ ID NO: 71949 - protein, 9 aa, unidentified
  REGION 1..9: note = Description of Unknown: Homing endonuclease sequence
LAGLIDADG

SEQ ID NO: 71950 - RNA, 100 nt, synthetic construct
  misc_feature 1..100: note = Artificial Sequence: Synthetic Oligonucleotide
  modified_base 1..3: mod_base = OTHER; note = 2'-O-methyl phosphorothioate nucleotides
  modified_base 97..99: mod_base = OTHER; note = 2'-O-methyl phosphorothioate nucleotides
  source 1..100: mol_type = other RNA
tgtgtgctggcccgcaacttgttttagagctagaaatagcaagttaaaataaggctagtccgttatcaacttgaaaaagtggcaccgagtcggtgctttt

SEQ ID NO: 71951 - RNA, 100 nt, synthetic construct
  misc_feature 1..100: note = Artificial Sequence: Synthetic Oligonucleotide
  modified_base 1..3: mod_base = OTHER; note = 2'-O-methyl phosphorothioate nucleotides
  modified_base 97..99: mod_base = OTHER; note = 2'-O-methyl phosphorothioate nucleotides
  source 1..100: mol_type = other RNA
cccactcaagagatatggtggttttagagctagaaatagcaagttaaaataaggctagtccgttatcaacttgaaaaagtggcaccgagtcggtgctttt

SEQ ID NO: 71952 - RNA, 100 nt, synthetic construct
  misc_feature 1..100: note = Artificial Sequence: Synthetic Oligonucleotide
  modified_base 1..3: mod_base = OTHER; note = 2'-O-methyl phosphorothioate nucleotides
  modified_base 97..99: mod_base = OTHER; note = 2'-O-methyl phosphorothioate nucleotides
  source 1..100: mol_type = other RNA
gtagaccaccagtaatctgagttttagagctagaaatagcaagttaaaataaggctagtccgttatcaacttgaaaaagtggcaccgagtcggtgctttt

SEQ ID NO: 71953 - RNA, 100 nt, synthetic construct
  misc_feature 1..100: note = Artificial Sequence: Synthetic Oligonucleotide
  modified_base 1..3: mod_base = OTHER; note = 2'-O-methyl phosphorothioate nucleotides
  modified_base 97..99: mod_base = OTHER; note = 2'-O-methyl phosphorothioate nucleotides
  source 1..100: mol_type = other RNA
agtatacctcccataccatggttttagagctagaaatagcaagttaaaataaggctagtccgttatcaacttgaaaaagtggcaccgagtcggtgctttt

SEQ ID NO: 71954 - RNA, 100 nt, synthetic construct
  misc_feature 1..100: note = Artificial Sequence: Synthetic Oligonucleotide
  modified_base 1..3: mod_base = OTHER; note = 2'-O-methyl phosphorothioate nucleotides
  modified_base 97..99: mod_base = OTHER; note = 2'-O-methyl phosphorothioate nucleotides
  source 1..100: mol_type = other RNA
ctgtcttattaccctgtcatgttttagagctagaaatagcaagttaaaataaggctagtccgttatcaacttgaaaaagtggcaccgagtcggtgctttt

SEQ ID NO: 71955 - RNA, 100 nt, synthetic construct
  misc_feature 1..100: note = Artificial Sequence: Synthetic Oligonucleotide
  modified_base 1..3: mod_base = OTHER; note = 2'-O-methyl phosphorothioate nucleotides
  modified_base 97..99: mod_base = OTHER; note = 2'-O-methyl phosphorothioate nucleotides
  source 1..100: mol_type = other RNA
actgagttctaaaatcatcggttttagagctagaaatagcaagttaaaataaggctagtccgttatcaacttgaaaaagtggcaccgagtcggtgctttt

SEQ ID NO: 71956 - RNA, 100 nt, synthetic construct
  misc_feature 1..100: note = Artificial Sequence: Synthetic Oligonucleotide
  modified_base 1..3: mod_base = OTHER; note = 2'-O-methyl phosphorothioate nucleotides
  modified_base 97..99: mod_base = OTHER; note = 2'-O-methyl phosphorothioate nucleotides
  source 1..100: mol_type = other RNA
gtcttcagcctacaacatacgttttagagctagaaatagcaagttaaaataaggctagtccgttatcaacttgaaaaagtggcaccgagtcggtgctttt

SEQ ID NO: 71957 - RNA, 100 nt, synthetic construct
  misc_feature 1..100: note = Artificial Sequence: Synthetic Oligonucleotide
  modified_base 1..3: mod_base = OTHER; note = 2'-O-methyl phosphorothioate nucleotides
  modified_base 97..99: mod_base = OTHER; note = 2'-O-methyl phosphorothioate nucleotides
  source 1..100: mol_type = other RNA
gttaagttcatgtcataggagttttagagctagaaatagcaagttaaaataaggctagtccgttatcaacttgaaaaagtggcaccgagtcggtgctttt

SEQ ID NO: 71958 - RNA, 100 nt, synthetic construct
  misc_feature 1..100: note = Artificial Sequence: Synthetic Oligonucleotide
  modified_base 1..3: mod_base = OTHER; note = 2'-O-methyl phosphorothioate nucleotides
  modified_base 97..99: mod_base = OTHER; note = 2'-O-methyl phosphorothioate nucleotides
  source 1..100: mol_type = other RNA
cttgtcaaggctattggtcagttttagagctagaaatagcaagttaaaataaggctagtccgttatcaacttgaaaaagtggcaccgagtcggtgctttt

SEQ ID NO: 71959 - RNA, 100 nt, synthetic construct
  misc_feature 1..100: note = Artificial Sequence: Synthetic Oligonucleotide
  modified_base 1..3: mod_base = OTHER; note = 2'-O-methyl phosphorothioate nucleotides
  modified_base 97..99: mod_base = OTHER; note = 2'-O-methyl phosphorothioate nucleotides
  source 1..100: mol_type = other RNA
ctaacagttgcttttatcacgttttagagctagaaatagcaagttaaaataaggctagtccgttatcaacttgaaaaagtggcaccgagtcggtgctttt

SEQ ID NO: 71960 - RNA, 100 nt, synthetic construct
  misc_feature 1..100: note = chemically synthesized
  variation 1..20: note = n is a, c, g, u, or other
  variation 1..20: note = n is a, c, g, or u
  source 1..100: mol_type = other RNA
nnnnnnnnnnnnnnnnnnnngttttagagctagaaatagcaagttaaaataaggctagtccgttatcaacttgaaaaagtggcaccgagtcggtgctttt

SEQ ID NO: 71961 - RNA, 96 nt, synthetic construct
  misc_feature 1..96: note = chemically synthesized
  variation 1..20: note = n is a, c, g, u, or other
  variation 1..20: note = n is a, c, g, or u
  source 1..96: mol_type = other RNA
nnnnnnnnnnnnnnnnnnnngttttagagctagaaatagcaagttaaaataaggctagtccgttatcaacttgaaaaagtggcaccgagtcggtgc

SEQ ID NO: 71962 - RNA, 114 nt, synthetic construct
  misc_feature 1..114: note = chemically synthesized
  variation 1..30: note = n is a, c, g, u, or other and this region may encompass 17-30 nucleotides;
  variation 1..30: note = n is a, c, g, or u
  variation 107..114: note = This region may encompass 1-8 urasil;
  source 1..114: mol_type = other RNA
nnnnnnnnnnnnnnnnnnnnnnnnnnnnnngttttagagctagaaatagcaagttaaaataaggctagtccgttatcaacttgaaaaagtggcaccgagtcggtgctttttttt
